(19) United States
(12) Patent Application Publication
(10) Pub. No.: US 2024/0190926 A1
(43) Pub. Date: Jun. 13, 2024

(54) P450-BM3 VARIANTS WITH IMPROVED ACTIVITY

(71) Applicant: Codexis, Inc., Redwood City, CA (US)

(72) Inventors: Margie Tabuga Borra-Garske, Palo Alto, CA (US); Jessica Anna Hurtak, Mountain View, CA (US); Anders Matthew Knight, Mountain View, CA (US); Kalyanaraman Krishnamoorthy, Livermore, CA (US); Jovana Nazor, Milpitas, CA (US); James Nicholas Riggins, San Francisco, CA (US); Nandhitha Subramanian, Cambridge (GB); Jonathan Vroom, South San Francisco, CA (US)

(21) Appl. No.: 18/516,310

(22) Filed: Nov. 21, 2023

Related U.S. Application Data
(60) Provisional application No. 63/384,746, filed on Nov. 22, 2022.

(51) Int. Cl. C07K 14/195

(52) U.S. Cl. CPC C07K 14/195

(57) ABSTRACT

The present invention provides improved P450-BM3 variants with improved activity. In some embodiments, the P450-BM3 variants exhibit improved activity on indanone substrates.

### CROSS REFERENCE TO RELATED APPLICATIONS

[0001] The present application claims priority to U.S. Prov. Pat. Appl. Ser. No. 63/384,746, filed Nov. 22, 2022, which is hereby incorporated by reference in its entirety for all purposes.

### FIELD OF THE INVENTION

[0002] The present invention provides improved P450-BM3 variants with improved activity. In some embodiments, the P450-BM3 variants exhibit improved activity on biaryl indanone substrates.

### REFERENCE TO SEQUENCE LISTING, TABLE OR COMPUTER PROGRAM

[0003] The official copy of the Sequence Listing is submitted concurrently with the specification as an XML file, with a file name of “CX2-233USP1_ST26.xml”, a creation date of Nov. 22, 2022, and a size of 2,640 kilobytes. The Sequence Listing filed is part of the specification and is incorporated in its entirety by reference herein.

### BACKGROUND OF THE INVENTION

[0004] The cytochrome P450 monooxygenases (“P450s”) comprise a large group of widely-distributed heme enzymes that are ubiquitous in the natural world. Cytochrome P450-BM3 (“P450-BM3”), obtained from Bacillus megaterium catalyzes the NADPH-dependent hydroxylation of long-chain fatty acids. alcohols, and amides, as well as the epoxidation of unsaturated fatty acids (See e.g., Narhi and Fulco, J. Biol. Chem., 261:7160-7169 [1986]; and Capdevila et al., J. Biol. Chem., 271:2263-22671 [1996]). P450-BM3 is unique, in that the reductase (65 kDa) and monooxygenase (55 kDa) domains of the enzyme are fused and produced as a catalytically self-sufficient 120 kDa enzyme. Although these enzymes have been the subject of numerous studies, there remains a need in the art for improved P450s that exhibit high levels of enzymatic activity on indanone substrates.

### SUMMARY OF THE INVENTION

[0005] The present invention provides improved P450-BM3 variants with improved activity. In some embodiments, the P450-BM3 variants exhibit improved activity on biaryl indanone substrates. A recombinant cytochrome P450-BM3 variant having at least 90% sequence identity to a polypeptide sequence comprising the sequence set forth in SEQ ID NOs: 2, 92, 96, 142, 162, 216, 288, 314, 546, 578, or 680. In some further embodiments, the recombinant cytochrome P450-BM3 variants oxidize at least one substrate selected from 4-O-aryl-7-methylsulfonyl-indanone, 4-methoxy-7-methylsulfonyl-indanone, and indanone.

[0006] The present invention provides novel biocatalysts and associated methods of use for the synthesis of hydroxy-indanone compounds from indanone substrates. The P450-BM3 variants of the present disclosure are engineered variants of a polypeptide (SEQ ID NO: 2), which is an engineered variant of the wild-type enzyme from Bacillus megaterium (SEQ ID NO: 786). These engineered polypeptides are capable of catalyzing the conversion of indanone substrates to hydroxy-indanone products, which are useful in the production of active pharmaceutical ingredients.

[0007] The present invention provides an engineered polypeptide comprising an amino acid sequence with at least 80%, 85%, 90%, 91%, 92%, 93%, 94%, 95%, 96%, 97%, 98%, 99% sequence identity to a reference sequence of SEQ ID NO: 2, comprising at least one substitution or one substitution set at one or more positions selected from 75, 75/607, 78, 86, 105/256/433/453/853, 105/256/433/550, 105/256/433/550/600/683/760/825, 105/256/550, 105/453/574, 147, 151, 154, 159, 179, 182, 182/573, 186, 254, 256, 256/433/453/550/663/685, 256/433/550/574/853, 256/433/574/584/663/748/825, 256/433/574/600, 256/663/915, 256/748/853, 330, 333, 349/574/600/623/825/853/915, 433/550, 433/561/574/600/663, 434, 437, 453/729, 561/574/663/915, 574/600/748, 584, 729, and 748, wherein the positions are numbered with reference to SEQ ID NO: 2. In some additional embodiments, the engineered polypeptide comprises at least one substitution or one substitution set selected from 75G, 75G/607G, 75S, 78V, 86S, 105G/256R/433K/550R, 105G/256R/433K/550R/600R/683Q/760A/825L, 105G/256R/433V/453G/853P, 105G/256R/550R, 105G/453G/574T, 147G, 147R, 151T, 154M, 159I, 159M, 179L, 182A, 182V/573R, 186G, 254L, 256R, 256R/433K/550R/574T/853P, 256R/433V/453G/550R/663L/6851, 256R/433V/574T/584R/663L/748L/825L, 256R/433V/574T/600R, 256R/663L/915I, 256R/748L/853P, 330G, 333P, 349A/574T/600R/623T/825L/853P/915I, 433K/550R, 433K/561N/574T/600R/663L, 434V, 437G, 437K, 437M, 437R, 453G/729C, 561N/574T/663L/915I, 574T/600R/748L, 584R, 729C, and 748L, wherein the positions are numbered with reference to SEQ ID NO: 2. In some embodiments, the engineered polypeptide comprises at least one substitution or one substitution set selected from A75G, A75G/S607G, A75S, F78V, G86S, L105G/S256R/D433K/D550R, L105G/S256R/D433K/D550R/D600R/R683Q/V760A/1825L, L105G/S256R/D433V/K453G/E853P, L105G/S256R/D550R, L105G/K453G/N574T, T147G, T147R, L15IT, 1154M, F159I, F159M, V179L, L182A, L182V/K573R, M186G, N254L, S256R, S256R/D433K/D550R/N574T/E853P, S256R/D433V/K453G/D550R/F663L/L685I, S256R/D433V/N574T/A584R/F663L/E748L/1825L, S256R/D433V/N574T/D600R, S256R/F663L/V915I, S256R/E748L/E853P, P330G, S333P, T349A/N574T/D600R/S623T/1825L/E853P/V915I, D433K/D550R, D433K/K561N/N574T/D600R/F663L, 1434V, T437G, T437K, T437M, T437R, K453G/L729C, K561N/N574T/F663L/V915I, N574T/D600R/E748L, A584R, L729C, and E748L, wherein the positions are numbered with reference to SEQ ID NO: 2.

[0008] The present invention also provides an engineered polypeptide comprising an amino acid sequence with at least 80%, 85%, 90%, 91%, 92%, 93%, 94%, 95%, 96%, 97%, 98%, 99% sequence identity to a reference sequence of SEQ ID NO: 92, comprising at least one substitution or one substitution set selected from: 775, 75/404, 75/404/437, 75/437, 147, 147/154, 147/254/331, 147/331, 151, 154/185, 179, 179/186, 179/186/437, 179/404, 185/237/331/434, 186, 186/404, 217/437, 259/437, 331, 404, and 437, wherein the positions are numbered with reference to SEQ ID NO: 92. In some embodiments, the engineered polypeptide comprises at least one substitution or one substitution set selected from 75G, 75G/404K, 75G/404K/437K, 75G/437K, 147R, 147R/154M, 147R/254L/331V, 147R/331L, 151V, 154M/185L, 179L, 179L/186G, 179L/186G/437K, 179L/404K, 185L/237R/331L/434V, 186G, 186G/404K, 217L/437K, 259L/437K, 331L, 331V, 404K, and 437K, wherein the positions are numbered with reference to SEQ ID NO: 92. In some further embodiments, the engineered polypeptide comprises at least one substitution or one substitution set selected from A75G, A75G/Q404K, A75G/Q404K/T437K, A75G/T437K, T147R, T147R/I154M, T147R/N254L/A331V, T147R/A331L, L151V, I154M/V185L, V179L, V179L/M186G, V179L/M186G/T437K, V179L/Q404K, V185L/Q237R/A331L/I434V, M186G, M186G/Q404K, V217L/T437K, I259L/T437K, A331L, A331V, Q404K, and T437K, wherein the positions are numbered with reference to SEQ ID NO: 92.

[0009] The present invention also provides an engineered polypeptide comprising an amino acid sequence with at least 80%, 85%, 90%, 91%, 92%, 93%, 94%, 95%, 96%, 97%, 98%, 99% sequence identity to a reference sequence of SEQ ID NO: 96, comprising at least one substitution or one substitution set selected from: 75, 178/618, 209, 213, and 259, wherein the positions are numbered with reference to SEQ ID NO: 96. In some embodiments, the engineered polypeptide comprises at least one substitution or one substitution set selected from 75A, 178V/618S, 209A, 213L, and 259V, wherein the positions are numbered with reference to SEQ ID NO: 96. In some further embodiments, the engineered polypeptide comprises at least one substitution or one substitution set selected from G75A, M178V/R618S, D209A, M213L, and I259V, wherein the positions are numbered with reference to SEQ ID NO: 96.

[0010] The present invention also provides an engineered polypeptide comprising an amino acid sequence with at least 80%, 85%, 90%, 91%, 92%, 93%, 94%, 95%, 96%, 97%, 98%, 99% sequence identity to a reference sequence of SEQ ID NO: 96, comprising at least one substitution or one substitution set selected from: 178, 178/618, 209, and 213, wherein the positions are numbered with reference to SEQ ID NO: 96. In some embodiments, the engineered polypeptide comprises at least one substitution or one substitution set selected from 178V, 178V/618S, 209A, and 213L, wherein the positions are numbered with reference to SEQ ID NO: 96. In some further embodiments, the engineered polypeptide comprises at least one substitution or one substitution set selected from M178V, M178V/R618S, D209A, and M213L, wherein the positions are numbered with reference to SEQ ID NO: 96.

[0011] The present invention also provides an engineered polypeptide comprising an amino acid sequence with at least 80%, 85%, 90%, 91%, 92%, 93%, 94%, 95%, 96%, 97%, 98%, 99% sequence identity to a reference sequence of SEQ ID NO: 142, comprising at least one substitution or one substitution set selected from: 29/209/210/435/437, 29/213/333/435, 209/210/259/435, 209/213/355/435/437, 333/435, 349/618, 454, 458, 458/618, 511/792, 553, 618/748, 655, 885, 888, 930, and 994, wherein the positions are numbered with reference to SEQ ID NO: 142. In some embodiments, the engineered polypeptide comprises at least one substitution or one substitution set selected from 29T/209A/210A/435G/437M, 29T/213L/333G/435G, 209A/210A/259V/435G, 209A/213L/355T/435S/437M, 333G/435G, 349I/618R, 454M, 458L, 458P/618R, 511S/792G, 553G, 618R/748Q, 655K, 885D, 885R, 885S, 888G, 930R, and 994N, wherein the positions are numbered with reference to SEQ ID NO: 142. In some further embodiments, the engineered polypeptide comprises at least one substitution or one substitution set selected from A29T/D209A/1210A/K435G/K437M, A29T/M213L/S333G/K435G, D209A/1210A/1259V/K435G, D209A/M213L/M355T/K435S/K437M, S333G/K435G, T349I/S618R, I454M, G458L, G458P/S618R, A511S/E792G, D553G, S618R/E748Q, P655K, P885D, P885R, P885S, E888G, E930R, and G994N, wherein the positions are numbered with reference to SEQ ID NO: 142.

[0012] The present invention also provides an engineered polypeptide comprising an amino acid sequence with at least 80%, 85%, 90%, 91%, 92%, 93%, 94%, 95%, 96%, 97%, 98%, 99% sequence identity to a reference sequence of SEQ ID NO: 162, comprising at least one substitution or one substitution set selected from: 66/209/349, 66/209/349/458, 66/355/435/454/458/553/613/770/888, 66/355/454/458/553/888/930, 66/435/458/613/770/885/888/930, 66/458/553/930, 209/349/355/435/770/888, 209/355/454/458/770, 209/435/454/458/613/770/885, 209/435/613, and 209/458/553/613, wherein the positions are numbered with reference to SEQ ID NO: 162. In some embodiments, the engineered polypeptide comprises at least one substitution or one substitution set selected from 66R/209A/349I, 66R/209A/349I/458L, 66R/355I/435G/454M/458L/553G/613A/770S/888G, 66R/355I/454M/458L/553G/888G/930R, 66R/435G/458L/613A/770S/885P/888G/930R, 66R/458L/553G/930R, 209A/349I/355I/435G/770S/888G, 209A/355I/454M/458L/770S, 209A/435G/454M/458L/613A/770S/885P, 209A/435G/613A, and 209A/458L/553G/613A, wherein the positions are numbered with reference to SEQ ID NO: 162. In some further embodiments, the engineered polypeptide comprises at least one substitution or one substitution set selected from S66R/D209A/T349I, S66R/D209A/T349I/G458L, S66R/M355I/K435G/I454M/G458L/D553G/T613A/A770S/E888G, S66R/M355I/I454M/G458L/D553G/E888G/E930R, S66R/K435G/G458L/T613A/A770S/D885P/E888G/E930R, S66R/G458L/D553G/E930R, D209A/T349I/M355I/K435G/A770S/E888G, D209A/M355I/I454M/G458L/A770S, D209A/K435G/I454M/G458L/T613A/A770S/D885P, D209A/K435G/T613A, and D209A/G458L/D553G/T613A, wherein the positions are numbered with reference to SEQ ID NO: 162.

[0013] The present invention also provides an engineered polypeptide comprising an amino acid sequence with at least 80%, 85%, 90%, 91%, 92%, 93%, 94%, 95%, 96%, 97%, 98%, 99% sequence identity to a reference sequence of SEQ ID NO: 162, comprising at least one substitution or one substitution set selected from: 39/53/55/81/216/253, 53/55/59/79/81/253, 53/55/81/206/253, 53/59, 55/59, 55/59/125/206, 55/59/206, 59/81/216/253, 76/79/83/182/268/329, 76/83/329, 79/182, 79/185/216, 79/253, 79/264/268/329, 79/329, 81, 82/83, 82/86/88/209/213, 82/86/178/209/210/213/261, 83/86/88/210/213, 83/178/210, 86/178/209/210, 88, 178/209/210/213, 178/209/213/260/261, 178/209/260, 182/329, 185/206/216/253, 209, 209/210/261, 209/260, 210/213, 260/261, 329, and 329/439, wherein the positions are numbered with reference to SEQ ID NO: 162. In some embodiments, the engineered polypeptide comprises at least one substitution or one substitution set selected from 39P/53V/55G/81A/216L/253E, 53V/55G/59V/79V/81A/253E, 53V/55G/81A/206F/253E, 53V/59V, 55G/59V, 55G/59V/125A/206F, 55G/59V/206F, 59V/81A/216L/253E, 76A/79G/83S/182G/268N/329V, 76V/83A/329G, 79G/182G, 79G/264V/268D/329V, 79G/329G, 79V/185A/216L, 79V/253E, 81A, 82A/86A/88P/209N/213A, 82V/83S, 82V/86A/178A/209N/210A/213I/261S, 83A/178A/210V, 83G/86V/88G/210A/213I, 86A/178G/209N/210V, 88V, 178A/209A/210S/213I, 178A/209A/213L/260A/261S, 178G/209N/260A, 182V/329V, 185A/206F/216L/253E, 209A, 209N/210A/261S, 209N/260A, 210A/213L, 210S/213L, 210V/213L, 260A/261S, 329G, and 329G/439A, wherein the positions are numbered with reference to SEQ ID NO: 162, In some further embodiments, the engineered polypeptide comprises at least one substitution or one substitution set selected from E39P/L53V/S55G/D81A/Y216L/G253E, L53V/S55G/159V/A79V/D81A/G253E, L53V/S55G/D81A/C206F/G253E, L53V/159V, S55G/159V, S55G/159V/V125A/C206F, S55G/159V/C206F, 159V/D81A/Y216L/G253E, L76A/A79G/L83S/L182G/E268N/A329V, L76V/L83A/A329G, A79G/L182G, A79G/1264V/E268D/A329V, A79G/A329G, A79V/V185A/Y216L, A79V/G253E, D81A, F82A/G86A/F88P/D209N/M213A, F82V/L83S, F82V/G86A/V178A/D209N/1210A/M213I/T261S, L83A/V178A/I210V, L83G/G86V/F88G/1210A/M213I, G86A/V178G/D209N/1210V, F88V, V178A/D209A/I210S/M213I, V178A/D209A/M213L/I260A/T261S, V178G/D209N/I260A, L182V/A329V, V185A/C206F/Y216L/G253E, D209A, D209N/1210A/T261S, D209N/I260A, I210A/M213L, 1210S/M213L, 1210V/M213L, I260A/T261S, A329G, and A329G/T439A, wherein the positions are numbered with reference to SEQ ID NO: 162.

[0014] The present invention also provides an engineered polypeptide comprising an amino acid sequence with at least 80%, 85%, 90%, 91%, 92%, 93%, 94%, 95%, 96%, 97%, 98%, 99% sequence identity to a reference sequence of SEQ ID NO: 216, comprising at least one substitution or one substitution set selected from: 75, 81, 177, 178, 181, 185, and 437, wherein the positions are numbered with reference to SEQ ID NO: 216. In some embodiments, the engineered polypeptide comprises at least one substitution or one substitution set selected from 75A, 75C, 75E, 75S, 75V, 81E, 177A, 178A, 178G. 181L, 181R, 1851, 185L, and 437R, wherein the positions are numbered with reference to SEQ ID NO: 216. In some further embodiments, the engineered polypeptide comprises at least one substitution or one substitution set selected from G75A, G75C, G75E, G75S, G75V, D81E, S177A, V178A, V178G, A181L, A181R, V185I, V185L, and K437R, wherein the positions are numbered with reference to SEQ ID NO: 216.

[0015] The present invention also provides an engineered polypeptide comprising an amino acid sequence with at least 80%, 85%, 90%, 91%, 92%, 93%, 94%, 95%, 96%, 97%, 98%, 99% sequence identity to a reference sequence of SEQ ID NO: 288, comprising at least one substitution or one substitution set selected from: 66/79, 66/79/81, 66/79/81/181/210/435/437, 66/79/81/185/435/437/458, 66/79/81/206/435/437/613, 66/79/81/206/437/458, 66/79/81/435/437/458, 66/79/81/437/613, 66/79/177/206/435/458/613, 66/79/181, 66/79/181/185/210/437/458/613, 66/79/185/210/437/458/613, 66/79/206, 66/79/206/435/437, 66/79/206/435/613, 66/79/209/210/437/613, 66/79/435, 66/79/435/437, 66/79/435/458, 66/79/437/458, 66/79/458/613, 66/178/435/437/458, 66/181/185/437, 66/181/185/458, 66/206/435/437, 66/206/437/458, 66/435/437, 66/435/437/458, 66/435/437/613, 66/437/458, 66/458, 79, 79/81/177/206/437/458/613, 79/81/181/437/458/613, 79/81/206/435/437, 79/81/206/613, 79/81/435/458/613, 79/81/437/613, 79/81/613, 79/177/206/437/458/613, 79/177/435/437/458, 79/181/185/209/210/437/458/613, 79/181/185/210/435/437, 79/181/185/210/435/437/458, 79/181/185/437, 79/181/209/437/613, 79/181/209/458/613, 79/181/210/458, 79/185/458, 79/206, 79/206/213/437/613, 79/206/435/437, 79/206/435/613, 79/206/458, 79/206/458/613, 79/210/437/458/613, 79/213/437/458, 79/435, 79/435/437/458, 79/435/437/613, 79/435/613, 79/437, 79/437/458, 79/458, 79/458/613, 79/613, 81/181/185/209/210/437/458/613, 95/177/437, 177/206/435/437/458, 177/435/437/613, 177/437, 178/437/458, 181/185/435/437, 181/185/435/437/613, 181/185/437, 181/185/437/458, 185/208/437/458, 185/435/437, 206/435/437, 206/437, 206/437/458/613, 435/437, 435/437/458, 435/437/458/613, 435/437/613, 437, 437/458, 437/458/613, 437/613, and 437/621, wherein the positions are numbered with reference to SEQ ID NO: 288. In some embodiments, the engineered polypeptide comprises at least one substitution or one substitution set selected from 66R/79A, 66R/79A/81A, 66R/79A/81A/181L/210A/435G/437R, 66R/79A/81A/185I/435G/437R/458L, 66R/79A/81A/206F/435G/437R/613A, 66R/79A/81A/206F/437R/458L, 66R/79A/81A/435G/437R/458L, 66R/79A/81A/437R/613A, 66R/79A/177A/206F/435G/458L/613A, 66R/79A/181L, 66R/79A/181L/185L/210A/437R/458L/613A, 66R/79A/185L/210A/437R/458L/613A, 66R/79A/206F, 66R/79A/206F/435G/437R, 66R/79A/206F/435G/613A, 66R/79A/209A/210A/437R/613A, 66R/79A/435G, 66R/79A/435G/437R, 66R/79A/435G/458L, 66R/79A/437R/458L, 66R/79A/458L/613A, 66R/178A/435G/437R/458L, 66R/181L/185L/437R, 66R/181L/185L/458L, 66R/206F/435G/437R, 66R/206F/437R/458L, 66R/435G/437R, 66R/435G/437R/458L, 66R/435G/437R/613A, 66R/437R/458L, 66R/458L, 79A, 79A/81A/177A/206F/437R/458L/613A, 79A/81A/181L/437R/458L/613A, 79A/81A/206F/435G/437R, 79A/81A/206F/613A, 79A/81A/435G/458L/613A, 79A/81A/437R/613A, 79A/81A/613A, 79A/177A/206F/437R/458L/613A, 79A/177A/435G/437R/458L, 79A/181L/185I/437R, 79A/181L/185L/209A/210A/437R/458L/613A, 79A/181L/185L/210A/435G/437R, 79A/181L/185L/210A/435G/437R/458L, 79A/181L/209A/437R/613A, 79A/181L/209A/458L/613A, 79A/181L/210A/458L, 79A/185L/458L, 79A/206F, 79A/206F/213A/437R/613A, 79A/206F/435G/437R, 79A/206F/435G/613A, 79A/206F/458L, 79A/206F/458L/613A, 79A/210A/437R/458L/613A, 79A/213I/437R/458L, 79A/435G, 79A/435G/437R/458L, 79A/435G/437R/613A, 79A/435G/613A, 79A/437R, 79A/437R/458L, 79A/458L, 79A/458L/613A, 79A/613A, 81A/181L/I85I/209A/210A/437R/458L/613A, 95L/177A/437R, 177A/206F/435G/437R/458L, 177A/435G/437R/613A, 177A/437R, 178A/437R/458L, 181L/185I/437R/458L, 181L/185L/435G/437R, 181L/185L/435G/437R/613A, 181L/185L/437R, 185I/208V/437R/458L, 185I/435G/437R, 206F/435G/437R, 206F/437R, 206F/437R/458L/613A, 435G/437R, 435G/437R/458L, 435G/437R/458L/613A, 435G/437R/613A, 437R, 437R/458L, 437R/458L/613A, 437R/613A, and 437R/621I, wherein the positions are numbered with reference to SEQ ID NO: 288. In some further embodiments, the engineered polypeptide comprises at least one substitution or one substitution set selected from S66R/G79A, S66R/G79A/D81A, S66R/G79A/D81A/A181L/I210A/K435G/K437R, S66R/G79A/D81A/V185I/K435G/K437R/G458L, S66R/G79A/D81A/C206F/K435G/K437R/T613A, S66R/G79A/D81A/C206F/K437R/G458L, S66R/G79A/D81A/K435G/K437R/G458L, S66R/G79A/D81A/K437R/T613A, S66R/G79A/S177A/C206F/K435G/G458L/T613A, S66R/G79A/A181L, S66R/G79A/A181L/V185L/1210A/K437R/G458L/T613A, S66R/G79A/V185L/1210A/K437R/G458L/T613A, S66R/G79A/C206F, S66R/G79A/C206F/K435G/K437R, S66R/G79A/C206F/K435G/T613A, S66R/G79A/D209A/1210A/K437R/T613A, S66R/G79A/K435G, S66R/G79A/K435G/K437R, S66R/G79A/K435G/G458L, S66R/G79A/K437R/G458L, S66R/G79A/G458L/T613A, S66R/V178A/K435G/K437R/G458L, S66R/A181L/V185L/K437R, S66R/A181L/V185L/G458L, S66R/C206F/K435G/K437R, S66R/C206F/K437R/G458L, S66R/K435G/K437R, S66R/K435G/K437R/G458L, S66R/K435G/K437R/T613A, S66R/K437R/G458L, S66R/G458L, G79A, G79A/D81A/S177A/C206F/K437R/G458L/T613A, G79A/D81A/A181L/K437R/G458L/T613A, G79A/D81A/C206F/K435G/K437R, G79A/D81A/C206F/T613A, G79A/D81A/K435G/G458L/T613A, G79A/D81A/K437R/T613A, G79A/D81A/T613A, G79A/S177A/C206F/K437R/G458L/T613A, G79A/S177A/K435G/K437R/G458L, G79A/A181L/V185I/K437R, G79A/A181L/V185L/D209A/1210A/K437R/G458L/T613A, G79A/A181L/V185L/1210A/K435G/K437R, G79A/A181L/V185L/1210A/K435G/K437R/G458L, G79A/A181L/D209A/K437R/T613A, G79A/A181L/D209A/G458L/T613A, G79A/A181L/1210A/G458L, G79A/V185L/G458L, G79A/C206F, G79A/C206F/M213A/K437R/T613A, G79A/C206F/K435G/K437R, G79A/C206F/K435G/T613A, G79A/C206F/G458L, G79A/C206F/G458L/T613A, G79A/1210A/K437R/G458L/T613A, G79A/M213I/K437R/G458L, G79A/K435G, G79A/K435G/K437R/G458L, G79A/K435G/K437R/T613A, G79A/K435G/T613A, G79A/K437R, G79A/K437R/G458L, G79A/G458L, G79A/G458L/T613A, G79A/T613A, D81A/A181L/V185I/D209A/I210A/K437R/G458L/T613A, P95L/S177A/K437R, S177A/C206F/K435G/K437R/G458L, S177A/K435G/K437R/T613A, S177A/K437R, V178A/K437R/G458L, A181L/V185I/K437R/G458L, A181L/V185L/K435G/K437R, A181L/V185L/K435G/K437R/T613A, A181L/V185L/K437R, V185I/E208V/K437R/G458L, V185I/K435G/K437R, C206F/K435G/K437R, C206F/K437R, C206F/K437R/G458L/T613A, K435G/K437R, K435G/K437R/G458L, K435G/K437R/G458L/T613A, K435G/K437R/T613A, K437R, K437R/G458L, K437R/G458L/T613A, K437R/T613A, and K437R/M6211, wherein the positions are numbered with reference to SEQ ID NO: 288.

[0016] The present invention also provides an engineered polypeptide comprising an amino acid sequence with at least 80%, 85%, 90%, 91%, 92%, 93%, 94%, 95%, 96%, 97%, 98%, 99% sequence identity to a reference sequence of SEQ ID NO: 314, comprising at least one substitution or one substitution set selected from: 66/111/114/177/181/185/374/603/613/726/853/896/897/999, 66/111/114/177/181/374/603/613/853/897/999, 66/111/114/177/181/374/603/644/853/896/999, 66/111/114/177/181/601/603/604/613/726/1026, 66/111/114/181/185/374, 66/111/114/181/185/374/603/604/897, 66/111/114/181/185/601/603/604/896, 66/111/114/181/185/601/603/604/896/1026, 66/111/114/181/374/601/603/604/644/726/896, 66/111/114/181/374/601/604/623/853/999/1026, 66/111/114/181/374/601/604/726/1026, 66/111/114/181/601/613/896/897/999, 66/111/114/181/603/613/726/853/897/999, 66/111/114/374/604/613/896/897/999, 66/177/181/185/374/601/604, 66/185/601/604/613/726/853/1026, 66/185/603/896/897, 66/374/601/603/604/853/897/1026, 66/601/604/896/897, 111/114/177/181/185/374/601/603/613/896, 111/114/181/185/374/603/604/999/1026, 111/114/181/185/601/604/853, 111/114/181/374, and 177/181/603/604, wherein the positions are numbered with reference to SEQ ID NO: 314. In some embodiments, the engineered polypeptide comprises at least one substitution or one substitution set selected from 66R/111H/114G/177A/181L/185I/374S/603F/613A/726L/853D/896L/897V/999C, 66R/111H/114G/181L/185I/601M/603F/604G/896L, 66R/111H/114G/181L/185I/601M/603F/604G/896L/1026Y, 66R/111H/114G/181L/601M/613A/896L/897V/999C, 66R/111H/114G/181L/603F/613A/726L/853D/897V/999C, 66R/111H/114R/181L/185I/374S/603F/604G/897V, 66R/111H/114R/181L/374S/601M/603F/604G/644T/726L/896L, 66R/111H/114R/181L/374S/601M/604G/623T/853D/999C/1026Y, 66R/111L/114R/177A/181L/374S/603F/613A/853D/897V/999C, 66R/111L/114R/177A/181L/374S/603F/644T/853D/896L/999C, 66R/111L/114R/177A/181L/601M/603F/604G/613A/726L/1026Y, 66R/111L/114R/181L/185I/374S, 66R/111L/114R/181L/374S/601M/604G/726L/1026Y, 66R/111L/114R/374S/604G/613A/896L/897V/999C, 66R/177A/181L/185I/374S/601M/604G, 66R/185I/601M/604G/613A/726L/853D/1026Y, 66R/185I/603F/896L/897V, 66R/374S/601M/603F/604G/853D/897V/1026Y, 66R/601M/604G/896L/897V, 111H/114G/177A/181L/185I/374S/601M/603F/613A/896L, 111H/114R/181L/185I/601M/604G/853D, 111L/114R/181L/185I/374S/603F/604G/999C/1026Y, 111L/114R/181L/374S, and 177A/181L/603F/604G, wherein the positions are numbered with reference to SEQ ID NO: 314. In some further embodiments, the engineered polypeptide comprises at least one substitution or one substitution set selected from S66R/R111H/K114G/S177A/A181L/V185I/E374S/E603F/T613A/Q726L/P853D/E896L/T897V/I999C, S66R/R111H/K114G/A181L/V185I/R601M/E603F/A604G/E896L, S66R/R111H/K114G/A181L/V185I/R601M/E603F/A604G/E896L/E1026Y, S66R/R111H/K114G/A181L/R601M/T613A/E896L/T897V/I999C, S66R/R111H/K114G/A181L/E603F/T613A/Q726L/P853D/T897V/I999C, S66R/R111H/K114R/A181L/V185I/E374S/E603F/A604G/T897V, S66R/R111H/K114R/A181L/E374S/R601M/E603F/A604G/S644T/Q726L/E896L, S66R/R111H/K114R/A181L/E374S/R601M/A604G/S623T/P853D/I999C/E1026Y, S66R/R111L/K114R/S177A/A181L/E374S/E603F/T613A/P853D/T897V/I999C, S66R/R111L/K114R/S177A/A181L/E374S/E603F/S644T/P853D/E896L/I999C, S66R/R111L/K114R/S177A/A181L/R601M/E603F/A604G/T613A/Q726L/E1026Y, S66R/R111L/K114R/A181L/V185I/E374S, S66R/R111L/K114R/A181L/E374S/R601M/A604G/Q726L/E1026Y, S66R/R111L/K114R/E374S/A604G/T613A/E896L/T897V/I999C, S66R/S177A/A181L/V185I/E374S/R601M/A604G, S66R/V185I/R601M/A604G/T613A/Q726L/P853D/E1026Y, S66R/V185I/E603F/E896L/T897V, S66R/E374S/R601M/E603F/A604G/P853D/T897V/E1026Y, S66R/R601M/A604G/E896L/T897V, R111H/K114G/S177A/A181L/V185I/E374S/R601M/E603F/T613A/E896L, R111H/K114R/A181L/V185I/R601M/A604G/P853D, R111L/K114R/A181L/V185I/E374S/E603F/A604G/I999C/E1026Y, R111L/K114R/A181L/E374S, and S177A/A181L/E603F/A604G, wherein the positions are numbered with reference to SEQ ID NO: 314.

[0017] The present invention also provides an engineered polypeptide comprising an amino acid sequence with at least 80%, 85%, 90%, 91%, 92%, 93%, 94%, 95%, 96%, 97%, 98%, 99% sequence identity to a reference sequence of SEQ ID NO: 162, comprising at least one substitution or one substitution set selected from: 179, 181, and 437, wherein the positions are numbered with reference to SEQ ID NO: 162. In some embodiments, the engineered polypeptide comprises at least one substitution or one substitution set selected from 179E, 179G, 181L, 437L, 437M, 437N, 437S, and 437V, wherein the positions are numbered with reference to SEQ ID NO: 162. In some further embodiments, the engineered polypeptide comprises at least one substitution or one substitution set selected from V179E, V179G, A181L, K437L, K437M, K437N, K437S, and K437V, wherein the positions are numbered with reference to SEQ ID NO: 162.

[0018] The present invention also provides an engineered polypeptide comprising an amino acid sequence with at least 80%, 85%, 90%, 91%, 92%, 93%, 94%, 95%, 96%, 97%, 98%, 99% sequence identity to a reference sequence of SEQ ID NO: 546, comprising at least one substitution or one substitution set selected from: 66/97/180/437/613, 66/180/404/458, 66/209/404/437/613, 66/404/437/458, 67, 74, 97/404/437/458/613, 111, 114, 121, 125, 136/437/613, 171, 180/181, 180/181/404/437/458, 180/404/458/613, 180/404/613, 180/613, 209/404/458/613, 228, 245, 260, 336, 341, 372, 374, 404/437/458/613, 408, 412, 483, 502, 522, 529, 530, and 547, wherein the positions are numbered with reference to SEQ ID NO: 546. In some embodiments, the engineered polypeptide comprises at least one substitution or one substitution set selected from 66R/97Y/180G/437M/613A, 66R/180G/404W/458L, 66R/209A/404W/437L/613A, 66R/404W/437L/458L, 67A, 67L, 67M, 74K, 74R, 97Y/404L/437N/458L/613A, 111H, 111L, 114G, 114N, 114R, 114V, 121M, 125W, 136V/437M/613A, 171G, 171M, 180G/181L, 180G/181L/404W/437M/458L, 180G/404W/458L/613A, 180G/404W/613A, 180G/613A, 209A/404W/458L/613A, 228L, 245A, 245G, 245R, 260L, 336S, 341C, 372F, 372R, 372S, 372Y, 374A, 374R, 374S, 404L/437N/458L/613A, 408Q, 408T, 412C, 412N, 412S, 412V, 483M, 502G, 522H, 529V, 530L, 547A, 547E, 547S, and 547V, wherein the positions are numbered with reference to SEQ ID NO: 546. In some further embodiments, the engineered polypeptide comprises at least one substitution or one substitution set selected from S66R/W97Y/R180G/K437M/T613A, S66R/R180G/Q404W/G458L, S66R/D209A/Q404W/K437L/T613A, S66R/Q404W/K437L/G458L, R67A, R67L, R67M, Q74K, Q74R, W97Y/Q404L/K437N/G458L/T613A, R111H, R111L, K114G, K114N, K114R, K114V, V121M, V125W, A136V/K437M/T613A, P171G, P171M, R180G/A181L, R180G/A181L/Q404W/K437M/G458L, R180G/Q404W/G458L/T613A, R180G/Q404W/T613A, R180G/T613A, D209A/Q404W/G458L/T613A, G228L, E245A, E245G, E245R, I260L, A336S, V341C, V372F, V372R, V372S, V372Y, E374A, E374R, E374S, Q404L/K437N/G458L/T613A, L408Q, L408T, T412C, T412N, T412S, T412V, L483M, A502G, G522H, A529V, V530L, Q547A, Q547E, Q547S, and Q547V, wherein the positions are numbered with reference to SEQ ID NO: 546.

[0019] The present invention also provides an engineered polypeptide comprising an amino acid sequence with at least 80%, 85%, 90%, 91%, 92%, 93%, 94%, 95%, 96%, 97%, 98%, 99% sequence identity to a reference sequence of SEQ ID NO: 546, comprising at least one substitution or one substitution set selected from: 66/97/180/437/613, 66/180/404/458, 66/209/404/437/613, 66/404/437/458, 67, 74, 97/404/437/458/613, 111, 114, 121, 125, 136/437/613, 171, 180/181/404/437/458, 180/404/458/613, 180/404/613, 180/613, 209/404/458/613, 228, 245, 260, 336, 341, 372, 374, 404/437/458/613, 408, 412, 483, 502, 522, 529, 530, and 547, wherein the positions are numbered with reference to SEQ ID NO: 546. In some embodiments, the engineered polypeptide comprises at least one substitution or one substitution set selected from 66R/97Y/180G/437M/613A, 66R/180G/404W/458L, 66R/209A/404W/437L/613A, 66R/404W/437L/458L, 67A, 67L, 67M, 74K, 74R, 97Y/404L/437N/458L/613A, 111A, 111H, 111L, 114G, 114N, 114R, 114V, 121M, 125W, 136V/437M/613A, 171G, 171M, 180G/181L/404W/437M/458L, 180G/404W/458L/613A, 180G/404W/613A, 180G/613A, 180S/404W/458L/613A, 209A/404W/458L/613A, 228L, 245A, 245G, 245R, 260L, 336S, 341C, 372F, 372R, 372S, 372Y, 374A, 374R, 374S, 404L/437N/458L/613A, 408Q, 408T, 412C, 412M, 412N, 412S, 412V, 483M, 502G, 522H, 529V, 530L, 547A, 547E, 547S, and 547V, wherein the positions are numbered with reference to SEQ ID NO: 546. In some further embodiments, the engineered polypeptide comprises at least one substitution or one substitution set selected from S66R/W97Y/R180G/K437M/T613A, S66R/R180G/Q404W/G458L, S66R/D209A/Q404W/K437L/T613A, S66R/Q404W/K437L/G458L, R67A, R67L, R67M, Q74K, Q74R, W97Y/Q404L/K437N/G458L/T613A, R111A, R111H, R11IL, K114G, K114N, K114R, K114V, V121M, V125W, A136V/K437M/T613A, P171G, P171M, R180G/A181L/Q404W/K437M/G458L, R180G/Q404W/G458L/T613A, R180G/Q404W/T613A, R180G/T613A, R180S/Q404W/G458L/T613A, D209A/Q404W/G458L/T613A, G228L, E245A, E245G, E245R, I260L, A336S, V341C, V372F, V372R, V372S, V372Y, E374A, E374R, E374S, Q404L/K437N/G458L/T613A, L408Q, L408T, T412C, T412M, T412N, T412S, T412V, L483M, A502G, G522H, A529V, V530L, Q547A, Q547E, Q547S, and Q547V, wherein the positions are numbered with reference to SEQ ID NO: 546.

[0020] The present invention also provides an engineered polypeptide comprising an amino acid sequence with at least 80%, 85%, 90%, 91%, 92%, 93%, 94%, 95%, 96%, 97%, 98%, 99% sequence identity to a reference sequence of SEQ ID NO: 546, comprising at least one substitution or one substitution set selected from: 66/180/404/458, 67, 74, 97/404/437/458/613, 111, 114, 121, 125, 171, 180/404/458/613, 180/404/613, 180/613, 209/404/458/613, 228, 245, 260, 372, 374, 408, 412, 502, 522, 529, 530, and 547, wherein the positions are numbered with reference to SEQ ID NO: 546. In some embodiments, the engineered polypeptide comprises at least one substitution or one substitution set selected from 66R/180G/404W/458L, 67M, 74K, 74R, 97Y/404L/437N/458L/613A, 111L, 114N, 114R, 114V, 121M, 125W, 171G, 171M, 180G/404W/458L/613A, 180G/404W/613A, 180G/613A, 180S/404W/458L/613A, 209A/404W/458L/613A, 228L, 245G, 245R, 260L, 372R, 372S, 372Y, 374R, 408Q, 408T, 412C, 412N, 502G, 522H, 529V, 530L, 547A, 547E, and 547V, wherein the positions are numbered with reference to SEQ ID NO: 546. In some further embodiments, the engineered polypeptide comprises at least one substitution or one substitution set selected from S66R/R180G/Q404W/G458L, R67M, Q74K, Q74R, W97Y/Q404L/K437N/G458L/T613A, R111L, K114N, K114R, K114V, V121M, V125W, P171G, P171M, R180G/Q404W/G458L/T613A, R180G/Q404W/T613A, R180G/T613A, R180S/Q404W/G458L/T613A, D209A/Q404W/G458L/T613A, G228L, E245G, E245R, I260L, V372R, V372S, V372Y, E374R, L408Q, L408T, T412C, T412N, A502G, G522H, A529V, V530L, Q547A, Q547E, and Q547V, wherein the positions are numbered with reference to SEQ ID NO: 546.

[0021] The present invention also provides an engineered polypeptide comprising an amino acid sequence with at least 80%, 85%, 90%, 91%, 92%, 93%, 94%, 95%, 96%, 97%, 98%, 99% sequence identity to a reference sequence of SEQ ID NO: 578, comprising at least one substitution or one substitution set selected from: 66/111, 66/111/114/171/547, 66/111/114/245, 66/111/114/260/412/547, 66/111/114/412/437, 66/111/171/245/547, 66/111/341/374, 66/111/372/547, 66/111/437, 111, 111/114, 111/114/171/260/341, 111/114/245/260, 111/114/245/372, 111/114/260/372/374/437, 111/114/412, 111/171/372/374, 111/171/374, 111/260/372, 337/624, 601, 603, and 623, wherein the positions are numbered with reference to SEQ ID NO: 578. In some embodiments, the engineered polypeptide comprises at least one substitution or one substitution set selected from 66R/111H/114G/412Q/437M, 66R/111H/171L/245A/547S, 66R/111H/372Y/547S, 66R/111L, 66R/111L/114G/260L/412Q/547S, 66R/111L/114R/171L/547S, 66R/111L/114R/245A, 66R/111L/341C/374S, 66R/111L/437M, 111H/114G, 111L, 111L/114G, 111L/114G/171L/260L/341C, 111L/114G/245A/260L, 111L/114G/412Q, 111L/114R/245A/372S, 111L/114R/260L/372S/374S/437M, 111L/171L/372S/374S, 111L/171L/374S, 111L/260L/372Y, 337E/624Q, 601M, 603F, and 623Q, wherein the positions are numbered with reference to SEQ ID NO: 578. In some further embodiments, the engineered polypeptide comprises at least one substitution or one substitution set selected from S66R/R111H/K114G/T412Q/K437M, S66R/R111H/P171L/E245A/Q547S, S66R/R111H/V372Y/Q547S, S66R/R111L, S66R/R111L/K114G/I260L/T412Q/Q547S, S66R/R111L/K114R/P171L/Q547S, S66R/R111L/K114R/E245A, S66R/R111L/V341C/E374S, S66R/R111L/K437M, R111H/K114G, R111L, R111L/K114G, R111L/K114G/P171L/I260L/V341C, R111L/K114G/E245A/I260L, R111L/K114G/T412Q, R111L/K114R/E245A/V372S, R111L/K114R/I260L/V372S/E374S/K437M, R111L/P171L/V372S/E374S, R111L/P171L/E374S, R111L/I260L/V372Y, K337E/D624Q, R601M, E603F, and S623Q, wherein the positions are numbered with reference to SEQ ID NO: 578.

[0022] The present invention also provides an engineered polypeptide comprising an amino acid sequence with at least 80%, 85%, 90%, 91%, 92%, 93%, 94%, 95%, 96%, 97%, 98%, 99% sequence identity to a reference sequence of SEQ ID NO: 680, comprising at least one substitution or one substitution set selected from: 66/111/601/604/623/726/853, 66/111/601/604/853, 66/111/603/726, 66/114/601/604/726/999, 66/374/601/603/604/726/853/1026, 66/374/601/604/726, 66/374/726/999, 66/601/603/604/896, 66/603/623/726/853/896/897, 66/623, 111/114/374/603/604/726/896/897, 111/114/601/623/726, 111/374/603/604/623/726, 111/603/604/623/726/896, 111/603/604/726/853, 111/603/604/896, 111/623, 114/374/603/604/623/726/853/897, 114/601/603/604, 374/601/603/726/896/897, 374/603/604/644, 374/603/604/726/853/999, 374/623/726/853/896/999, 374/853/897/999/1026, 601/604/726, 601/604/726/897, 603/604/726/896/897, 604/726/853/999/1026, 623/644/726/1026, and 726/897, wherein the positions are numbered with reference to SEQ ID NO: 680. In some embodiments, the engineered polypeptide comprises at least one substitution or one substitution set selected from 66R/111H/601M/604G/623T/726L/853D, 66R/111H/601M/604G/853D, 66R/111H/603F/726L, 66R/114R/601M/604G/726L/999C, 66R/374S/601M/603F/604G/726L/853D/1026Y, 66R/374S/601M/604G/726L, 66R/374S/726L/999C, 66R/601M/603F/604G/896L, 66R/603F/623Q/726L/853D/896L/897V, 66R/623Q, 111H/114R/374S/603F/604G/726L/896L/897V, 111H/114R/601M/623Q/726L, 111H/374S/603F/604G/623Q/726L, 111H/603F/604G/623Q/726L/896L, 111H/603F/604G/726L/853D, 111H/603F/604G/896L, 111H/623T, 114R/374S/603F/604G/623T/726L/853D/897V, 114R/601M/603F/604G, 374S/601M/603F/726L/896L/897V, 374S/603F/604G/644T, 374S/603F/604G/726L/853D/999C, 374S/623T/726L/853D/896L/999C, 374S/853D/897V/999C/1026Y, 601M/604G/726L, 601M/604G/726L/897V, 603F/604G/726L/896L/897V, 604G/726L/853D/999C/1026Y, 623Q/644T/726L/1026Y, and 726L/897V, wherein the positions are numbered with reference to SEQ ID NO: 680. In some further embodiments, the engineered polypeptide comprises at least one substitution or one substitution set selected from S66R/L111H/R601M/A604G/S623T/Q726L/P853D, S66R/L111H/R601M/A604G/P853D, S66R/L111H/E603F/Q726L, S66R/G114R/R601M/A604G/Q726L/I999C, S66R/E374S/R601M/E603F/A604G/Q726L/P853D/E1026Y, S66R/E374S/R601M/A604G/Q726L, S66R/E374S/Q726L/I999C, S66R/R601M/E603F/A604G/E896L, S66R/E603F/S623Q/Q726L/P853D/E896L/T897V, S66R/S623Q, L111H/G114R/E374S/E603F/A604G/Q726L/E896L/T897V, L111H/G114R/R601M/S623Q/Q726L, L111H/E374S/E603F/A604G/S623Q/Q726L, L111H/E603F/A604G/S623Q/Q726L/E896L, L111H/E603F/A604G/Q726L/P853D, L111H/E603F/A604G/E896L, L111H/S623T, G114R/E374S/E603F/A604G/S623T/Q726L/P853D/T897V, G114R/R601M/E603F/A604G, E374S/R601M/E603F/Q726L/E896L/T897V, E374S/E603F/A604G/S644T, E374S/E603F/A604G/Q726L/P853D/I999C, E374S/S623T/Q726L/P853D/E896L/I999C, E374S/P853D/T897V/I999C/E1026Y, R601M/A604G/Q726L, R601M/A604G/Q726L/T897V, E603F/A604G/Q726L/E896L/T897V, A604G/Q726L/P853D/I999C/E1026Y, S623Q/S644T/Q726L/E1026Y, and Q726L/T897V, wherein the positions are numbered with reference to SEQ ID NO: 680.

[0023] The present invention further provides isolated recombinant polynucleotide sequences encoding the recombinant cytochrome P450-BM3 polypeptide variants provided herein. In some embodiments, the isolated recombinant polynucleotide sequence comprises SEQ ID NO: 1, 91, 95, 141, 161, 215, 287, 313, 545, 577, or 679.

[0024] The present invention also provides expression vectors comprising at least one polynucleotide sequence provided herein. In some additional embodiments, the vector comprises at least one polynucleotide sequence that is operably linked with at least one regulatory sequence suitable for expression of the polynucleotide sequence in a suitable host cell. In some embodiments, the host cell is a prokaryotic or eukaryotic cell. In some additional embodiments, the host cell is a prokaryotic cell. In some further embodiments, the host cell is E. coli. The present invention also provides host cells comprising the vectors provided herein.

[0025] The present invention also provides methods for producing at least one recombinant cytochrome P450-BM3 variant comprising culturing the host cell provided herein under conditions such that at least one of the recombinant cytochrome P450-BM3 variants provided herein is produced by the host cell. In some additional embodiments, the methods further comprise the step of recovering at least one recombinant cytochrome P450 variant.

### DESCRIPTION OF THE INVENTION

[0026] The present invention provides improved P450-BM3 variants with improved activity. In some embodiments, the P450-BM3 variants exhibit improved activity on biaryl indanone substrates. P450-BM3 enzymes exhibit the highest rate of catalysis amongst P450 monooxygenases due to the efficient electron transfer between the fused reductase and heme domains (See e.g., Noble et al., Biochem. J., 339:371-379 [1999]; and Munro et al., Eur. J. Biochem., 239:403-409 [2009]). Thus, P450-BM3 is a highly desirable enzyme for the manipulation of biotechnological processes (See e.g., Sawayama et al., Chem., 15:11723-11729 [2009]; Otey et al., Biotechnol. Bioeng., 93:494-499 [2006]; Damsten et al., Biol. Interact., 171:96-107 [2008]; and Di Nardo and Gilardi, Int. J. Mol. Sci., 13:15901-15924). However, there still remains a need in the art for P450 enzymes that exhibit activity on indanone substrates. The present invention provides P450-BM3 variants that have improved enzymatic activity on indanone substrates, as compared to a parental P450-BM3 sequence (i.e., SEQ ID NO: 2, 92, 96, 142, 162, 216. 288, 314, 546, 578, or 680).

[0027] In some embodiments, the present invention provides P450-BM3 variants that provide improved total percent conversion/activity for the oxidation of multiple indanone substrates. In particular, during the development of the present invention, beneficial diversity was identified and recombined based on HTP screening results.

### Abbreviations and Definitions

[0028] Unless defined otherwise, all technical and scientific terms used herein generally have the same meaning as commonly understood by one of ordinary skill in the art to which this invention pertains. Generally, the nomenclature used herein and the laboratory procedures of cell culture, molecular genetics. microbiology, organic chemistry, analytical chemistry and nucleic acid chemistry described below are those well-known and commonly employed in the art. Such techniques are well-known and described in numerous texts and reference works well known to those of skill in the art. Standard techniques, or modifications thereof, are used for chemical syntheses and chemical analyses. All patents, patent applications, articles and publications mentioned herein, both supra and infra, are hereby expressly incorporated herein by reference.

[0029] Although any suitable methods and materials similar or equivalent to those described herein find use in the practice of the present invention, some methods and materials are described herein. It is to be understood that this invention is not limited to the particular methodology, protocols, and reagents described, as these may vary, depending upon the context they are used by those of skill in the art. Accordingly, the terms defined immediately below are more fully described by reference to the application as a whole. All patents, patent applications, articles and publications mentioned herein, both supra and infra, are hereby expressly incorporated herein by reference.

[0030] Also, as used herein, the singular “a”, “an,” and “the” include the plural references, unless the context clearly indicates otherwise.

[0031] Numeric ranges are inclusive of the numbers defining the range. Thus, every numerical range disclosed herein is intended to encompass every narrower numerical range that falls within such broader numerical range, as if such narrower numerical ranges were all expressly written herein. It is also intended that every maximum (or minimum) numerical limitation disclosed herein includes every lower (or higher) numerical limitation, as if such lower (or higher) numerical limitations were expressly written herein.

[0032] The term “about” means an acceptable error for a particular value. In some instances, “about” means within 0.05%, 0.5%, 1.0%, or 2.0%, of a given value range. In some instances, “about” means within 1, 2, 3, or 4 standard deviations of a given value.

[0033] Furthermore, the headings provided herein are not limitations of the various aspects or embodiments of the invention which can be had by reference to the application as a whole. Accordingly, the terms defined immediately below are more fully defined by reference to the application as a whole. Nonetheless, in order to facilitate understanding of the invention, a number of terms are defined below.

[0034] Unless otherwise indicated, nucleic acids are written left to right in 5′ to 3′ orientation; amino acid sequences are written left to right in amino to carboxy orientation, respectively.

[0035] As used herein, the term “comprising” and its cognates are used in their inclusive sense (i.e., equivalent to the term “including” and its corresponding cognates).

[0036] “EC” number refers to the Enzyme Nomenclature of the Nomenclature Committee of the International Union of Biochemistry and Molecular Biology (NC-IUBMB). The IUBMB biochemical classification is a numerical classification system for enzymes based on the chemical reactions they catalyze.

[0037] “ATCC” refers to the American Type Culture Collection whose biorepository collection includes genes and strains.

[0038] “NCBI” refers to National Center for Biological Information and the sequence databases provided therein.

[0039] As used herein “cytochrome P450-BM3” and “P450-BM3” refer to the cytochrome P450 enzyme obtained from Bacillus megaterium that catalyzes the NADPH-dependent hydroxylation of long-chain fatty acids, alcohols, and amides, as well as the epoxidation of unsaturated fatty acids.

[0040] “Protein,” “polypeptide,” and “peptide” are used interchangeably herein to denote a polymer of at least two amino acids covalently linked by an amide bond, regardless of length or post-translational modification (e.g., glycosylation or phosphorylation).

[0041] “Amino acids” are referred to herein by either their commonly known three-letter symbols or by the one-letter symbols recommended by IUPAC-IUB Biochemical Nomenclature Commission. Nucleotides, likewise, may be referred to by their commonly accepted single letter codes.

[0042] The term “engineered,” “recombinant,” “non-naturally occurring,” and “variant,” when used with reference to a cell, a polynucleotide or a polypeptide refers to a material or a material corresponding to the natural or native form of the material that has been modified in a manner that would not otherwise exist in nature or is identical thereto but produced or derived from synthetic materials and/or by manipulation using recombinant techniques.

[0043] As used herein, “wild-type” and “naturally-occurring” refer to the form found in nature. For example a wild-type polypeptide or polynucleotide sequence is a sequence present in an organism that can be isolated from a source in nature and which has not been intentionally modified by human manipulation.

[0044] “Coding sequence” refers to that part of a nucleic acid (e.g., a gene) that encodes an amino acid sequence of a protein.

[0045] The term “percent (%) sequence identity” is used herein to refer to comparisons among polynucleotides and polypeptides, and are determined by comparing two optimally aligned sequences over a comparison window, wherein the portion of the polynucleotide or polypeptide sequence in the comparison window may comprise additions or deletions (i.e., gaps) as compared to the reference sequence for optimal alignment of the two sequences. The percentage may be calculated by determining the number of positions at which the identical nucleic acid base or amino acid residue occurs in both sequences to yield the number of matched positions, dividing the number of matched positions by the total number of positions in the window of comparison and multiplying the result by 100 to yield the percentage of sequence identity. Alternatively, the percentage may be calculated by determining the number of positions at which either the identical nucleic acid base or amino acid residue occurs in both sequences or a nucleic acid base or amino acid residue is aligned with a gap to yield the number of matched positions, dividing the number of matched positions by the total number of positions in the window of comparison and multiplying the result by 100 to yield the percentage of sequence identity.

[0046] Those of skill in the art appreciate that there are many established algorithms available to align two sequences. Optimal alignment of sequences for comparison can be conducted, e.g., by the local homology algorithm of Smith and Waterman (Smith and Waterman, Adv. Appl. Math., 2:482 [1981]), by the homology alignment algorithm of Needleman and Wunsch (Needleman and Wunsch, J. Mol. Biol., 48:443 [1970), by the search for similarity method of Pearson and Lipman (Pearson and Lipman, Proc. Natl. Acad. Sci. USA 85:2444 [1988]), by computerized implementations of these algorithms (e.g., GAP, BESTFIT, FASTA, and TFASTA in the GCG Wisconsin Software Package), or by visual inspection, as known in the art. Examples of algorithms that are suitable for determining percent sequence identity and sequence similarity include, but are not limited to the BLAST and BLAST 2.0 algorithms, which are described by Altschul et al. (Sec. Altschul et al., J. Mol. Biol., 215: 403-410 [1990]; and Altschul et al., 1977, Nucl. Acids Res., 3389-3402 [1977]. respectively). Software for performing BLAST analyses is publicly available through the National Center for Biotechnology Information website. This algorithm involves first identifying high scoring sequence pairs (HSPs) by identifying short words of length W in the query sequence, which either match or satisfy some positive-valued threshold score T when aligned with a word of the same length in a database sequence. T is referred to as, the neighborhood word score threshold (See, Altschul et al. supra). These initial neighborhood word hits act as seeds for initiating searches to find longer HSPs containing them. The word hits are then extended in both directions along each sequence for as far as the cumulative alignment score can be increased. Cumulative scores are calculated using, for nucleotide sequences, the parameters M (reward score for a pair of matching residues; always >0) and N (penalty score for mismatching residues; always <0). For amino acid sequences, a scoring matrix is used to calculate the cumulative score. Extension of the word hits in each direction are halted when; the cumulative alignment score falls off by the quantity X from its maximum achieved value; the cumulative score goes to zero or below, due to the accumulation of one or more negative-scoring residue alignments; or the end of either sequence is reached. The BLAST algorithm parameters W, T, and X determine the sensitivity and speed of the alignment. The BLASTN program (for nucleotide sequences) uses as defaults a wordlength (W) of 11, an expectation (E) of 10, M=5, N=−4, and a comparison of both strands. For amino acid sequences, the BLASTP program uses as defaults a wordlength (W) of 3, an expectation (E) of 10, and the BLOSUM62 scoring matrix (See, Henikoff and Henikoff, Proc. Natl. Acad. Sci. USA 89:10915 [1989]). Exemplary determination of sequence alignment and % sequence identity can employ the BESTFIT or GAP programs in the GCG Wisconsin Software package (Accelrys, Madison WI), using default parameters provided.

[0047] “Reference sequence” refers to a defined sequence used as a basis for a sequence comparison. A reference sequence may be a subset of a larger sequence, for example, a segment of a full-length gene or polypeptide sequence. Generally, a reference sequence is at least 20 nucleotide or amino acid residues in length, at least 25 residues in length, at least 50 residues in length, at least 100 residues in length or the full length of the nucleic acid or polypeptide. Since two polynucleotides or polypeptides may each (1) comprise a sequence (i.e., a portion of the complete sequence) that is similar between the two sequences, and (2) may further comprise a sequence that is divergent between the two sequences, sequence comparisons between two (or more) polynucleotides or polypeptides are typically performed by comparing sequences of the two polynucleotides or polypeptides over a “comparison window” to identify and compare local regions of sequence similarity. In some embodiments, a “reference sequence” can be based on a primary amino acid sequence, where the reference sequence is a sequence that can have one or more changes in the primary sequence. “Comparison window” refers to a conceptual segment of at least about 20) contiguous nucleotide positions or amino acid residues wherein a sequence may be compared to a reference sequence of at least 20 contiguous nucleotides or amino acids and wherein the portion of the sequence in the comparison window may comprise additions or deletions (i.e., gaps) of 20 percent or less as compared to the reference sequence (which does not comprise additions or deletions) for optimal alignment of the two sequences. The comparison window can be longer than 20 contiguous residues, and includes, optionally 30, 40, 50, 100, or longer windows.

[0048] “Corresponding to”, “reference to” or “relative to” when used in the context of the numbering of a given amino acid or polynucleotide sequence refers to the numbering of the residues of a specified reference sequence when the given amino acid or polynucleotide sequence is compared to the reference sequence. In other words, the residue number or residue position of a given polymer is designated with respect to the reference sequence rather than by the actual numerical position of the residue within the given amino acid or polynucleotide sequence. For example, a given amino acid sequence, such as that of an engineered P450-BM3, can be aligned to a reference sequence by introducing gaps to optimize residue matches between the two sequences. In these cases, although the gaps are present, the numbering of the residue in the given amino acid or polynucleotide sequence is made with respect to the reference sequence to which it has been aligned.

[0049] “Amino acid difference” or “residue difference” refers to a difference in the amino acid residue at a position of a polypeptide sequence relative to the amino acid residue at a corresponding position in a reference sequence. The positions of amino acid differences generally are referred to herein as “Xn,” where n refers to the corresponding position in the reference sequence upon which the residue difference is based. For example, a “residue difference at position X93 as compared to SEQ ID NO:2” refers to a difference of the amino acid residue at the polypeptide position corresponding to position 93 of SEQ ID NO:2. Thus, if the reference polypeptide of SEQ ID NO:2 has a serine at position 93, then a “residue difference at position X93 as compared to SEQ ID NO:2” an amino acid substitution of any residue other than serine at the position of the polypeptide corresponding to position 93 of SEQ ID NO:2. In most instances herein, the specific amino acid residue difference at a position is indicated as “XnY” where “Xn” specified the corresponding position as described above, and “Y” is the single letter identifier of the amino acid found in the engineered polypeptide (i.e., the different residue than in the reference polypeptide). In some instances (e.g., in Tables 2.2, 4.1, 5.1, 5.2, 6.1, 7.1, 7.3, 8.1, 9.1, 10.1, 11.2, 12.1. 12.2, 12.3, 13.1, and 14.1), the present disclosure also provides specific amino acid differences denoted by the conventional notation “AnB”, where A is the single letter identifier of the residue in the reference sequence. “n” is the number of the residue position in the reference sequence, and B is the single letter identifier of the residue substitution in the sequence of the engineered polypeptide. In some instances, a polypeptide of the present disclosure can include one or more amino acid residue differences relative to a reference sequence, which is indicated by a list of the specified positions where residue differences are present relative to the reference sequence. In some embodiments, where more than one amino acid can be used in a specific residue position of a polypeptide, the various amino acid residues that can be used are separated by a “/” (e.g., X307H/X307P or X307H/P). The present application includes engineered polypeptide sequences comprising one or more amino acid differences that include either/or both conservative and non-conservative amino acid substitutions.

[0050] “Conservative amino acid substitution” refers to a substitution of a residue with a different residue having a similar side chain, and thus typically involves substitution of the amino acid in the polypeptide with amino acids within the same or similar defined class of amino acids. By way of example and not limitation, an amino acid with an aliphatic side chain may be substituted with another aliphatic amino acid (e.g., alanine, valine, leucine, and isoleucine); an amino acid with hydroxyl side chain is substituted with another amino acid with a hydroxyl side chain (e.g., serine and threonine); an amino acids having aromatic side chains is substituted with another amino acid having an aromatic side chain (e.g., phenylalanine, tyrosine, tryptophan, and histidine); an amino acid with a basic side chain is substituted with another amino acid with a basis side chain (e.g., lysine and arginine); an amino acid with an acidic side chain is substituted with another amino acid with an acidic side chain (e.g., aspartic acid or glutamic acid); and/or a hydrophobic or hydrophilic amino acid is replaced with another hydrophobic or hydrophilic amino acid, respectively.

[0051] “Non-conservative substitution” refers to substitution of an amino acid in the polypeptide with an amino acid with significantly differing side chain properties. Non-conservative substitutions may use amino acids between, rather than within, the defined groups and affects (a) the structure of the peptide backbone in the area of the substitution (e.g., proline for glycine) (b) the charge or hydrophobicity, or (c) the bulk of the side chain. By way of example and not limitation, an exemplary non-conservative substitution can be an acidic amino acid substituted with a basic or aliphatic amino acid; an aromatic amino acid substituted with a small amino acid; and a hydrophilic amino acid substituted with a hydrophobic amino acid.

[0052] “Deletion” refers to modification to the polypeptide by removal of one or more amino acids from the reference polypeptide. Deletions can comprise removal of 1 or more amino acids, 2 or more amino acids, 5 or more amino acids, 10 or more amino acids, 15 or more amino acids, or 20 or more amino acids, up to 10% of the total number of amino acids, or up to 20% of the total number of amino acids making up the reference enzyme while retaining enzymatic activity and/or retaining the improved properties of an engineered P450-BM3 enzyme. Deletions can be directed to the internal portions and/or terminal portions of the polypeptide. In various embodiments, the deletion can comprise a continuous segment or can be discontinuous.

[0053] “Insertion” refers to modification to the polypeptide by addition of one or more amino acids from the reference polypeptide. Insertions can be in the internal portions of the polypeptide, or to the carboxy or amino terminus. Insertions as used herein include fusion proteins as is known in the art. The insertion can be a contiguous segment of amino acids or separated by one or more of the amino acids in the naturally occurring polypeptide.

[0054] A “functional fragment” or a “biologically active fragment” used interchangeably herein refers to a polypeptide that has an amino-terminal and/or carboxy-terminal deletion(s) and/or internal deletions, but where the remaining amino acid sequence is identical to the corresponding positions in the sequence to which it is being compared (e.g., a full-length engineered P450-BM3 of the present invention) and that retains substantially all of the activity of the full-length polypeptide.

[0055] “Isolated polypeptide” refers to a polypeptide which is substantially separated from other contaminants that naturally accompany it, e.g., protein, lipids, and polynucleotides. The term embraces polypeptides which have been removed or purified from their naturally-occurring environment or expression system (e.g., host cell or in vitro synthesis). The recombinant P450-BM3 polypeptides may be present within a cell, present in the cellular medium, or prepared in various forms, such as lysates or isolated preparations. As such, in some embodiments, the recombinant P450-BM3 polypeptides can be an isolated polypeptide.

[0056] “Substantially pure polypeptide” refers to a composition in which the polypeptide species is the predominant species present (i.e., on a molar or weight basis it is more abundant than any other individual macromolecular species in the composition), and is generally a substantially purified composition when the object species comprises at least about 50 percent of the macromolecular species present by mole or % weight. However, in some embodiments, the composition comprising P450-BM3 comprises P450-BM3 that this less than 50% pure (e.g., about 10%, about 20%, about 30%, about 40%, or about 50%) Generally, a substantially pure P450-BM3 composition comprises about 60% or more, about 70% or more, about 80% or more, about 90% or more, about 95% or more, and about 98% or more of all macromolecular species by mole or % weight present in the composition. In some embodiments, the object species is purified to essential homogeneity (i.e., contaminant species cannot be detected in the composition by conventional detection methods) wherein the composition consists essentially of a single macromolecular species. Solvent species, small molecules (<500) Daltons), and elemental ion species are not considered macromolecular species. In some embodiments, the isolated recombinant P450-BM3 polypeptides are substantially pure polypeptide compositions.

[0057] “Improved enzyme property” refers to an engineered P450-BM3 polypeptide that exhibits an improvement in any enzyme property as compared to a reference P450-BM3 polypeptide and/or a wild-type P450-BM3 polypeptide or another engineered P450-BM3 polypeptide. Improved properties include but are not limited to such properties as increased protein expression, increased thermoactivity, increased thermostability, increased pH activity, increased stability, increased enzymatic activity, increased substrate specificity or affinity, increased specific activity, increased resistance to substrate or end-product inhibition, increased chemical stability, improved chemoselectivity, improved solvent stability, increased tolerance to acidic pH, increased tolerance to proteolytic activity (i.e., reduced sensitivity to proteolysis). reduced aggregation, increased solubility, and altered temperature profile.

[0058] “Increased enzymatic activity” or “enhanced catalytic activity” refers to an improved property of the engineered P450-BM3 polypeptides, which can be represented by an increase in specific activity (e.g., product produced/time/weight protein) or an increase in percent conversion of the substrate to the product (e.g., percent conversion of starting amount of substrate to product in a specified time period using a specified amount of P450-BM3) as compared to the reference P450-BM3 enzyme. Exemplary methods to determine enzyme activity are provided in the Examples. Any property relating to enzyme activity may be affected, including the classical enzyme properties of Kₘ, Vₘₐₓ or k_{cal}, changes of which can lead to increased enzymatic activity. Improvements in enzyme activity can be from about 1.1 fold the enzymatic activity of the corresponding wild-type enzyme, to as much as 2-fold, 5-fold, 10-fold, 20-fold, 25-fold, 50-fold, 75-fold, 100-fold, 150-fold, 200-fold or more enzymatic activity than the naturally occurring P450-BM3 or another engineered P450-BM3 from which the P450-BM3 polypeptides were derived.

[0059] “Conversion” refers to the enzymatic conversion (or biotransformation) of a substrate(s) to the corresponding product(s). “Percent conversion” refers to the percent of the substrate that is converted to the product within a period of time under specified conditions. Thus, the “enzymatic activity” or “activity” of a P450-BM3 polypeptide can be expressed as “percent conversion” of the substrate to the product in a specific period of time.

[0060] Enzymes with “generalist properties” (or “generalist enzymes”) refer to enzymes that exhibit improved activity for a wide range of substrates, as compared to a parental sequence. Generalist enzymes do not necessarily demonstrate improved activity for every possible substrate. In particular, the present invention provides P450-BM3 variants with generalist properties, in that they demonstrate similar or improved activity relative to the parental gene for a wide range of sterically and electronically diverse substrates. In addition, the generalist enzymes provided herein were engineered to be improved across a wide range of diverse API-like molecules to increase the production of metabolites/products.

[0061] “Hybridization stringency” relates to hybridization conditions, such as washing conditions, in the hybridization of nucleic acids. Generally, hybridization reactions are performed under conditions of lower stringency, followed by washes of varying but higher stringency. The term “moderately stringent hybridization” refers to conditions that permit target-DNA to bind a complementary nucleic acid that has about 60% identity, preferably about 75% identity, about 85% identity to the target DNA, with greater than about 90% identity to target-polynucleotide. Exemplary moderately stringent conditions are conditions equivalent to hybridization in 50% formamide, 5x Denhart's solution, 5×SSPE, 0.2% SDS at 42° C. followed by washing in 0.2×SSPE, 0.2% SDS, at 42° C. “High stringency hybridization” refers generally to conditions that are about 10° C. or less from the thermal melting temperature Tₘ as determined under the solution condition for a defined polynucleotide sequence. In some embodiments, a high stringency condition refers to conditions that permit hybridization of only those nucleic acid sequences that form stable hybrids in 0.018M NaCl at 65° C. (i.e., if a hybrid is not stable in 0.018M NaCl at 65° C., it will not be stable under high stringency conditions, as contemplated herein). High stringency conditions can be provided, for example, by hybridization in conditions equivalent to 50% formamide, 5×Denhart's solution, 5×SSPE, 0.2% SDS at 42° C., followed by washing in 0.1×SSPE, and 0.1% SDS at 65° C. Another high stringency condition is hybridizing in conditions equivalent to hybridizing in 5×SSC containing 0.1% (w:v) SDS at 65° C., and washing in 0.1×SSC containing 0.1% SDS at 65° C. Other high stringency hybridization conditions, as well as moderately stringent conditions, are described in the references cited above.

[0062] “Codon optimized” refers to changes in the codons of the polynucleotide encoding a protein to those preferentially used in a particular organism such that the encoded protein is more efficiently expressed in the organism of interest. Although the genetic code is degenerate in that most amino acids are represented by several codons, called “synonyms” or “synonymous” codons, it is well known that codon usage by particular organisms is nonrandom and biased towards particular codon triplets. This codon usage bias may be higher in reference to a given gene, genes of common function or ancestral origin, highly expressed proteins versus low copy number proteins, and the aggregate protein coding regions of an organism's genome. In some embodiments, the polynucleotides encoding the P450-BM3 enzymes may be codon optimized for optimal production from the host organism selected for expression.

[0063] “Control sequence” refers herein to include all components, which are necessary or advantageous for the expression of a polynucleotide and/or polypeptide of the present application. Each control sequence may be native or foreign to the nucleic acid sequence encoding the polypeptide. Such control sequences include, but are not limited to, a leader, polyadenylation sequence, propeptide sequence, promoter sequence, signal peptide sequence, initiation sequence and transcription terminator. At a minimum, the control sequences include a promoter, and transcriptional and translational stop signals. The control sequences may be provided with linkers for the purpose of introducing specific restriction sites facilitating ligation of the control sequences with the coding region of the nucleic acid sequence encoding a polypeptide.

[0064] “Operably linked” is defined herein as a configuration in which a control sequence is appropriately placed (i.e., in a functional relationship) at a position relative to a polynucleotide of interest such that the control sequence directs or regulates the expression of the polynucleotide and/or polypeptide of interest.

[0065] “Promoter sequence” refers to a nucleic acid sequence that is recognized by a host cell for expression of a polynucleotide of interest, such as a coding sequence. The promoter sequence contains transcriptional control sequences, which mediate the expression of a polynucleotide of interest. The promoter may be any nucleic acid sequence which shows transcriptional activity in the host cell of choice including mutant, truncated, and hybrid promoters, and may be obtained from genes encoding extracellular or intracellular polypeptides either homologous or heterologous to the host cell.

[0066] “Suitable reaction conditions” refers to those conditions in the enzymatic conversion reaction solution (e.g., ranges of enzyme loading, substrate loading, temperature, pH, buffers, co-solvents, etc.) under which a P450-BM3 polypeptide of the present application is capable of converting a substrate to the desired product compound. Exemplary “suitable reaction conditions” are provided in the present application and illustrated by the Examples. “Loading”, such as in “compound loading” or “enzyme loading” refers to the concentration or amount of a component in a reaction mixture at the start of the reaction. “Substrate” in the context of an enzymatic conversion reaction process refers to the compound or molecule acted on by the P450-BM3 polypeptide. “Product” in the context of an enzymatic conversion process refers to the compound or molecule resulting from the action of the P450-BM3 polypeptide on a substrate.

[0067] As used herein the term “culturing” refers to the growing of a population of microbial cells under any suitable conditions (e.g., using a liquid, gel or solid medium).

[0068] Recombinant polypeptides can be produced using any suitable methods known in the art. Genes encoding the wild-type polypeptide of interest can be cloned in vectors, such as plasmids, and expressed in desired hosts, such as E. coli, etc. Variants of recombinant polypeptides can be generated by various methods known in the art. Indeed, there is a wide variety of different mutagenesis techniques well known to those skilled in the art. In addition, mutagenesis kits are also available from many commercial molecular biology suppliers. Methods are available to make specific substitutions at defined amino acids (site-directed), specific or random mutations in a localized region of the gene (regio-specific), or random mutagenesis over the entire gene (e.g., saturation mutagenesis). Numerous suitable methods are known to those in the art to generate enzyme variants, including but not limited to site-directed mutagenesis of single-stranded DNA or double-stranded DNA using PCR, cassette mutagenesis, gene synthesis, error-prone PCR, shuffling, and chemical saturation mutagenesis, or any other suitable method known in the art. Non-limiting examples of methods used for DNA and protein engineering are provided in the following patents: U.S. Pat. Nos. 6,117,679; 6,420,175; 6,376,246; 6,586,182; 7,747,391; 7,747,393; 7,783,428; 8,383,346. After the variants are produced, they can be screened for any desired property (e.g., high or increased activity, or low or reduced activity, increased thermal activity, increased thermal stability, and/or acidic pH stability. etc.). In some embodiments, “recombinant P450-BM3 polypeptides” (also referred to herein as “engineered P450-BM3 polypeptides.” “variant P450-BM3 enzymes,” and “P450)-BM3 variants”) find use.

[0069] As used herein, a “vector” is a DNA construct for introducing a DNA sequence into a cell. In some embodiments, the vector is an expression vector that is operably linked to a suitable control sequence capable of effecting the expression in a suitable host of the polypeptide encoded in the DNA sequence. In some embodiments, an “expression vector” has a promoter sequence operably linked to the DNA sequence (e.g., transgene) to drive expression in a host cell, and in some embodiments, also comprises a transcription terminator sequence.

[0070] As used herein, the term “expression” includes any step involved in the production of the polypeptide including, but not limited to, transcription, post-transcriptional modification, translation, and post-translational modification. In some embodiments, the term also encompasses secretion of the polypeptide from a cell.

[0071] As used herein, the term “produces” refers to the production of proteins and/or other compounds by cells. It is intended that the term encompass any step involved in the production of polypeptides including, but not limited to, transcription, post-transcriptional modification, translation, and post-translational modification. In some embodiments, the term also encompasses secretion of the polypeptide from a cell.

[0072] As used herein, an amino acid or nucleotide sequence (e.g., a promoter sequence, signal peptide, terminator sequence, etc.) is “heterologous” to another sequence with which it is operably linked if the two sequences are not associated in nature.

[0073] As used herein, the terms “host cell” and “host strain” refer to suitable hosts for expression vectors comprising DNA provided herein (e.g., the polynucleotides encoding the P450-BM3 variants). In some embodiments, the host cells are prokaryotic or eukaryotic cells that have been transformed or transfected with vectors constructed using recombinant DNA techniques as known in the art.

[0074] The term “analogue” means a polypeptide having more than 70% sequence identity but less than 100% sequence identity (e.g., more than 75%, 78%, 80%, 83%, 85%, 88%, 90%, 91%, 92%, 93%, 94%, 95%, 96%, 97%, 98%, 99% sequence identity) with a reference polypeptide. In some embodiments, analogues mean polypeptides that contain one or more non-naturally occurring amino acid residues including, but not limited, to homoarginine, ornithine and norvaline, as well as naturally occurring amino acids. In some embodiments, analogues also include one or more D-amino acid residues and non-peptide linkages between two or more amino acid residues.

[0075] The term “effective amount” means an amount sufficient to produce the desired result. One of general skill in the art may determine what the effective amount by using routine experimentation.

[0076] The terms “isolated” and “purified” are used to refer to a molecule (e.g., an isolated nucleic acid, polypeptide, etc.) or other component that is removed from at least one other component with which it is naturally associated. The term “purified” does not require absolute purity, rather it is intended as a relative definition.

### Engineered P450-BM3 Polypeptides

[0077] The present invention provides improved P450-BM3 variants with improved activity on indanone substrates. In some embodiments, the present disclosure provides P450-BM3 variants (or MYCP) with improved monooxygenase activity towards 4-methoxy-7-methylsulfonyl-indanone (compound (1)) and increased conversion to the product of 3-hydroxy-4-methoxy-7-methylsulfonyl-indanone (compound (2)), as compared to the starting polypeptide (Scheme 1).

[chemical structure]

[0078] In some embodiments, the present disclosure provides P450-BM3 variants (or MYCP) with improved monooxygenase activity towards biaryl indanone substrates. In some embodiments, the present disclosure provides P450-BM3 variants (or MYCP) with improved monooxygenase activity towards 4-O-aryl-7-methylsulfonyl-indanone (compound (3)) and increased conversion to the product of 3-hydroxy-4-O-aryl-7-methylsulfonyl-indanone (compound (4)), as compared to the starting polypeptide (Scheme 2).

[chemical structure]

[0079] In some embodiments, the present disclosure provides P450-BM3 variants (or MYCP) with improved monooxygenase activity in the conversion of indanone (compound (5)) to the product of 3-hydroxy-1-indanone (compound (6)), as compared to the starting polypeptide (Scheme 3).

[chemical structure]

[0080] The present invention provides exemplary engineered P450-BM3 polypeptides having P450-BM3 activity (i.e., P450-BM3 variants). The Examples provide Tables showing sequence structural information correlating specific amino acid sequence features with the functional activity of the engineered P450-BM3 polypeptides. This structure-function correlation information is provided in the form of specific amino acid residues differences relative to a reference engineered polypeptide, as indicated in the Examples. The Examples further provide experimentally determined activity data for the exemplary engineered P450-BM3 polypeptides.

[0081] In some embodiments, the engineered P450-BM3 polypeptides of the invention having P450-BM3 activity comprise: a) an amino acid sequence having at least 85% sequence identity to reference sequence SEQ ID NO: 2, 92, 96, 142, 162, 216, 288, 314, 546, 578, or 680; b) an amino acid residue difference as compared to SEQ ID NO: 2, 92, 96, 142, 162, 216, 288, 314, 546, 578, or 680 at one or more amino acid positions: and c) which exhibits an improved property selected from i) enhanced catalytic activity, ii) reduced proteolytic sensitivity, iii) increased tolerance to acidic pH, iv) reduced aggregation, v) increased activity on indanone substrates, vi) increased solubility, vii) increased activity in solvents, or viii) increased selectivity toward the desired chiral product or a combination of any of i), ii), iii), iv), v), vi), vii), or viii), as compared to the reference sequence.

[0082] In some embodiments the engineered P450-BM3 which exhibits an improved property has at least about 85%, at least about 88%, at least about 90%, at least about 91%, at least about 92%, at least about 93%, at least about 94%, at least about 95%, at least about 96%, at least about 97%, at least about 98%, at least about 99%, or at about 100% amino acid sequence identity with SEQ ID NO: 2, 92, 96, 142, 162, 216, 288, 314, 546, 578, or 680), and an amino acid residue difference as compared to SEQ ID NO: 2, 92, 96, 142, 162, 216, 288, 314, 546, 578, or 680), at one or more amino acid positions (such as at 1, 2, 3, 4, 5, 6, 7, 8, 9, 10, 11, 12, 14, 15, 20 or more amino acid positions compared to SEQ ID NO: 2, 92, 96, 142, 162, 216, 288, 314, 546, 578, or 680), or a sequence having at least 85%, at least 88%, at least 90%, at least 91%, at least 92%, at least 93%, at least 94%, at least 95%, at least 96%, at least 97%, at least 98%, at least 99% or greater amino acid sequence identity with SEQ ID NO: 2, 92, 96, 142, 162, 216, 288, 314, 546, 578, or 680)). In some embodiments, the residue difference as compared to SEQ ID NO: 2, 92, 96, 142, 162, 216, 288, 314, 546, 578, or 680), at one or more positions will include at least 1, 2, 3, 4, 5, 6, 7, 8, 9, 10 or more conservative amino acid substitutions. In some embodiments, the engineered P450-BM3 polypeptide is a polypeptide listed in any of Tables 2.2, 4.1, 5.1, 5.2, 6.1, 7.1, 7.3, 8.1, 9.1, 10.1, 11.2, 12.1, 12.2, 12.3, 13.1, and 14.1.

[0083] In some embodiments the engineered P450-BM3 which exhibits an improved property has at least 85%, at least 88%, at least 90%, at least 91%, at least 92%, at least 93%, at least 94%, at least 95%, at least 96%, at least 97%, at least 98%, or at least 99% amino acid sequence identity with SEQ ID NO: 2. 92, 96, 142, 162, 216, 288, 314, 546, 578, or 680.

[0084] In some embodiments, the engineered P450-BM3 polypeptides of the present disclosure comprise an amino acid sequence having at least 85%, 90%, 95%, or 99% sequence identity to a reference sequence of SEQ ID NO: 2, 92, 96, 142, 162, 216, 288, 314, 546, 578, or 680 and an amino acid residue difference as compared to SEQ ID NO: 2, 92, 96, 142, 162, 216, 288, 314, 546, 578, or 680) at one or more amino acid positions, wherein said engineered P450-BM3 polypeptide converts 4-methoxy-7-methylsulfonyl-indanone (compound (1)) to 3-hydroxy-4-methoxy-7-methylsulfonyl-indanone (compound (2)) with at least 1.5 fold, 2.0 fold, or 4.5 fold the activity of a reference engineered P450-BM3 polypeptide of SEQ ID NO: 2, 92, 96, 142, 162, 216, 288, 314, 546, 578, or 680).

[0085] In some embodiments, the engineered P450-BM3 polypeptides of the present disclosure comprise an amino acid sequence having at least 85%, 90%, 95%, or 99% sequence identity to a reference sequence of SEQ ID NO: 2, 92, 96, 142, 162, 216, 288, 314, 546, 578, or 680) and an amino acid residue difference as compared to SEQ ID NO: 2, 92, 96, 142, 162, 216, 288, 314, 546, 578, or 680 at one or more amino acid positions, wherein said engineered P450-BM3 polypeptide converts 4-O-aryl-7-methylsulfonyl-indanone (compound (3)) to 3-hydroxy-4-O-aryl-7-methylsulfonyl-indanone (compound (4)) with at least 1.5 fold, 2.0 fold, or 4.5 fold the activity of a reference engineered P450-BM3 polypeptide of SEQ ID NO: 2, 92, 96, 142, 162, 216, 288, 314, 546, 578, or 680).

[0086] In some embodiments, the engineered P450-BM3 polypeptides of the present disclosure comprise an amino acid sequence having at least 85%, 90%, 95%, or 99% sequence identity to a reference sequence of SEQ ID NO: 2, 92, 96, 142, 162, 216, 288, 314, 546, 578, or 680) and an amino acid residue difference as compared to SEQ ID NO: 2, 92, 96, 142, 162, 216, 288, 314, 546, 578, or 680 at one or more amino acid positions, wherein said engineered P450-BM3 polypeptide converts indanone (compound (5)) to 3-hydroxy-1-indanone (compound (6)) with at least 1.5 fold, 2.0 fold, or 4.5 fold the activity of a reference engineered P450-BM3 polypeptide of SEQ ID NO: 2, 92, 96, 142, 162, 216, 288, 314, 546, 578, or 680).

[0087] In some embodiments, the engineered P450-BM3 polypeptide comprises a functional fragment of an engineered P450)-BM3 polypeptide encompassed by the invention. Functional fragments have at least 95%, 96%, 97%, 98%, or 99% of the activity of the engineered P450-BM3 polypeptide from which is derived (i.e., the parent engineered P450-BM3). A functional fragment comprises at least 90%, 91%, 92%, 93%, 94%, 95%, 96%, 97%, 98% and even 99% of the parent sequence of the engineered P450-BM3. In some embodiments the functional fragment is truncated by less than 5, less than 10, less than 15, less than 10, less than 25, less than 30, less than 35, less than 40, less than 45, and less than 50 amino acids.

### Methods of Using the Engineered P450-BM3 Polypeptides Enzymes

[0088] In some embodiments, the engineered P450-BM3 polypeptides of the invention having P450-BM3 activity comprise: a) an amino acid sequence having at least 85% sequence identity to reference sequence SEQ ID NO: 2, 92, 96, 142, 162, 216, 288, 314, 546, 578, or 680, or a fragment thereof: b) an amino acid residue difference as compared to SEQ ID NO: 2, 92, 96, 142, 162, 216, 288, 314, 546, 578, or 680, at one or more amino acid positions: and c) which exhibits improved activity, as compared to SEQ ID NO: 2, 92, 96, 142, 162, 216, 288, 314, 546, 578, or 680.

[0089] In some embodiments, the engineered P450-BM3 that exhibits improved activity has at least 85%, at least 88%, at least 90%, at least 91%, at least 92%, at least 93%, at least 94%, at least 95%, at least 96%, at least 97%, at least 98%, at least 99% or greater amino acid sequence identity with SEQ ID NO: 2, 92, 96, 142, 162, 216, 288, 314, 546, 578, or 680, and an amino acid residue difference as compared to SEQ ID NO: 2, 92, 96, 142, 162, 216, 288, 314, 546, 578, or 680, at one or more amino acid positions (such as at 1, 2, 3, 4, 5, 6, 7, 8, 9, 10, 11, 12, 14, 15, 20 or more amino acid positions compared to SEQ ID NO: 2, 92, 96, 142, 162, 216, 288, 314, 546, 578, or 680, or a sequence having at least 85%, at least 88%, at least 90%, at least 91%, at least 92%, at least 93%, at least 94%, at least 95%, at least 96%, at least 97%, at least 98%, at least 99% or greater amino acid sequence identity with SEQ ID NO: 2, 92, 96, 142, 162, 216, 288, 314, 546, 578, or 680).

[0090] In some embodiments, when all other assay conditions are essentially the same, the engineered P450-BM3 polypeptide has improved activity as compared to a reference P450-BM3 polypeptide. In some embodiments this activity can be measured under conditions that monitor enzymatic activity using any suitable assay system to assess the maximum activity of the enzyme (e.g., the k_{cat}). In other embodiments this activity can be measured under substrate concentrations resulting in one-half, one-fifth, one-tenth or less of maximal activity. Under either method of analysis, the engineered polypeptide has improved activity levels about 1.0 fold, 1.5-fold, 2-fold, 5-fold, 10-fold, 20-fold, 25-fold, 50-fold, 75-fold, 100-fold, or more of the enzymatic activity of the reference P450-BM3 In some embodiments, the engineered P450-BM3 polypeptide having improved activity as compared to a reference P450-BM3 when measured by any standard assay, including, but not limited to the assays described in the Examples.

[0091] In some embodiments, the engineered P450-BM3 polypeptides described herein find use in processes for converting a indanone substrate, such as 4-O-aryl-7-methylsulfonyl-indanone (compound (1)), 4-methoxy-7-methylsulfonyl-indanone (compound (3)), or indanone (compound (5)), to its corresponding nucleoside triphosphate product, such as 3-hydroxy-4-methoxy-7-methylsulfonyl-indanone (compound (2)), 3-hydroxy-4-O-aryl-7-methylsulfonyl-indanone (compound (4)), or 3-hydroxy-1-indanone (compound (6)). Generally, the process for performing the monooxygenation reaction comprises contacting or incubating the substrate compound in presence of a co-substrate, such as NADP+, with an engineered P450)-BM3 polypeptide of the invention under reaction conditions suitable for formation of the hydroxylated product, as shown in Scheme 1, Scheme 2, and Scheme 3, above.

[0092] In the embodiments provided herein and illustrated in the Examples, various ranges of suitable reaction conditions that can be used in the processes, include but are not limited to, substrate loading. reductant, recycling system, pH, temperature, buffer, solvent system, polypeptide loading, and reaction time. Further suitable reaction conditions for carrying out the process for biocatalytic conversion of substrate compounds to product compounds using an engineered P450-BM3 polypeptide described herein can be readily optimized in view of the guidance provided herein by routine experimentation that includes, but is not limited to, contacting the engineered P450-BM3 polypeptide and substrate compound under experimental reaction conditions of concentration, pH, temperature, and solvent conditions, and detecting the product compound.

[0093] Suitable reaction conditions using the engineered P450-BM3 polypeptides typically comprise a NADP+ co-substrate, which is used stoichiometrically in the monooxygenation reaction. Generally, the co-substrate for engineered P450-BM3 polypeptide is NADP+. Other reductants that are capable of serving as co-substrates for engineered P450-BM3 polypeptides can be used. In some embodiments, the suitable reaction conditions can comprise a co-substrate concentration, particularly NADP+ of about 0.0005 M to about 2 M, 0.01 M to about 2 M, 0.1 M to about 2 M, 0.2 M to about 2 M, about 0.5 M to about 2 M, or about 1 M to about 2 M. In some embodiments, the reaction conditions comprise a co-substrate concentration of about 0.0001 M, 0.001 M, 0.01 M, 0.1 M, 0.2 M, 0.3 M, 0.4 M, 0.5 M, 0.6 M, 0.7 M, 0.8 M, 1 M, 1.5 M, or 2 M, depending on desired conversion. In some embodiments, additional co-substrate can be added during the reaction. In some embodiments, an NADP⁺ recycling system can be used in the reaction.

[0094] Substrate compound in the reaction mixtures can be varied, taking into consideration, for example, the desired amount of product compound, the effect of substrate concentration on enzyme activity, stability of enzyme under reaction conditions, and the percent conversion of substrate to product. In some embodiments, the suitable reaction conditions comprise a substrate compound loading of at least about 0.5 to about 200 g/L, 1 to about 200 g/L, 5 to about 150 g/L, about 10 to about 100 g/L, 20 to about 100 g/L or about 50 to about 100 g/L. In some embodiments, the suitable reaction conditions comprise a substrate compound loading of at least about 0.5 g/L, at least about 1 g/L, at least about 5 g/L, at least about 10 g/L, at least about 15 g/L, at least about 20 g/L, at least about 30 g/L, at least about 50 g/L, at least about 75 g/L, at least about 100 g/L, at least about 150 g/L or at least about 200 g/L, or even greater.

[0095] In carrying out the engineered P450-BM3 mediated processes described herein, the engineered polypeptide may be added to the reaction mixture in the form of a purified enzyme, partially purified enzyme, whole cells transformed with gene(s) encoding the enzyme, as cell extracts and/or lysates of such cells, and/or as an enzyme immobilized on a solid support. Whole cells transformed with gene(s) encoding the engineered P450-BM3 enzyme or cell extracts, lysates thereof, and isolated enzymes may be employed in a variety of different forms, including solid (e.g., lyophilized, spray-dried, and the like) or semisolid (e.g., a crude paste). The cell extracts or cell lysates may be partially purified by precipitation (ammonium sulfate, polyethyleneimine, heat treatment or the like, followed by a desalting procedure prior to lyophilization (e.g., ultrafiltration dialysis, etc.). Any of the enzyme preparations (including whole cell preparations) may be stabilized by crosslinking using known crosslinking agents, such as, for example, glutaraldehyde or immobilization to a solid phase (e.g., Eupergit C, and the like).

[0096] The gene(s) encoding the engineered P450-BM3 polypeptides can be transformed into host cells separately or together into the same host cell. For example, in some embodiments one set of host cells can be transformed with gene(s) encoding one engineered P450-BM3 polypeptide and another set can be transformed with gene(s) encoding another engineered P450-BM3 polypeptide. Both sets of transformed cells can be utilized together in the reaction mixture in the form of whole cells, or in the form of lysates or extracts derived therefrom. In other embodiments, a host cell can be transformed with gene(s) encoding multiple engineered P450-BM3 polypeptides. In some embodiments the engineered polypeptides can be expressed in the form of secreted polypeptides, and the culture medium containing the secreted polypeptides can be used for the P450-BM3 reaction.

[0097] In some embodiments, the improved activity and/or selectivity of the engineered P450-BM3 polypeptides disclosed herein provides for processes wherein higher percentage conversion can be achieved with lower concentrations of the engineered polypeptide. In some embodiments of the process. the suitable reaction conditions comprise an engineered polypeptide amount of about 0.03% (w/w), 0.05% (w/w), 0.1% (w/w), 0.15% (w/w), 0.2% (w/w), 0.3% (w/w), 0.4% (w/w), 0.5% (w/w), 1% (w/w). 2% (w/w), 5% (w/w), 10% (w/w), 20% (w/w) or more, depending on the substrate compound loading and desired conversion.

[0098] In some embodiments, the engineered polypeptide is present at about 0.01 g/L to about 15 g/L; about 0.05 g/L to about 15 g/L; about 0.1 g/L to about 10 g/L; about 1 g/L to about 8 g/L; about 0.5 g/L to about 10 g/L; about 1 g/L to about 10 g/L; about 0.1 g/L to about 5 g/L; about 0.5 g/L to about 5 g/L; or about 0.1 g/L to about 2 g/L. In some embodiments, the engineered P450-BM3 polypeptide is present at about 0.01 g/L, 0.05 g/L, 0.1 g/L, 0.2 g/L, 0.5 g/L, 1 g/L, 2 g/L, 5 g/L, 10 g/L, 15 g/L or more.

[0099] During the course of the reaction, the pH of the reaction mixture may change. The pH of the reaction mixture may be maintained at a desired pH or within a desired pH range. This may be done by the addition of an acid or a base, before and/or during the course of the reaction. Alternatively, the pH may be controlled by using a buffer. Accordingly, in some embodiments, the reaction condition comprises a buffer. Suitable buffers to maintain desired pH ranges are known in the art and include, by way of example and not limitation, potassium phosphate, borate, phosphate, 2-(N-morpholino)ethanesulfonic acid (MES), 3-(N-morpholino)propanesulfonic acid (MOPS), acetate, triethanolamine, and 2-amino-2-hydroxymethyl-propane-1.3-diol (Tris), and the like. In some embodiments, the buffer is potassium phosphate. In some embodiments of the process, the suitable reaction conditions comprise a buffer concentration of from about 0.01 to about 0.4 M, 0.05 to about 0.4 M, 0.1 to about 0.3 M, or about 0.1 to about 0.2 M. In some embodiments, the reaction condition comprises a buffer concentration of about 0.01, 0.02, 0.03, 0.04, 0.05, 0.07, 0.1, 0.12, 0.14, 0.16, 0.18, 0.2, 0.3, or 0.4 M.

[0100] In some embodiments, the reaction conditions comprise a solvent. Any suitable solvent may be used. In some embodiments, the solvent comprises acetonitrile or DMSO. In some embodiments, the reaction conditions comprise a solvent concentration of 2%, 5%, 20%, 15%, 20%, 25%, or 30%,

[0101] In the embodiments of the process, the reaction conditions can comprise a suitable pH. The desired pH or desired pH range can be maintained by use of an acid or base, an appropriate buffer, or a combination of buffering and acid or base addition. The pH of the reaction mixture can be controlled before and/or during the course of the reaction. In some embodiments, the suitable reaction conditions comprise a solution pH from about 4 to about 10, pH from about 5 to about 10, pH from about 5 to about 9, pH from about 6 to about 9, pH from about 6 to about 8. In some embodiments, the reaction conditions comprise a solution pH of about 4, 4.5, 5, 5.5, 6, 6.5, 7, 7.5, 8, 8.5, 9, 9.5, or 10.

[0102] In the embodiments of the processes herein, a suitable temperature can be used for the reaction conditions, for example, taking into consideration the increase in reaction rate at higher temperatures, and the activity of the enzyme during the reaction time period. Accordingly, in some embodiments, the suitable reaction conditions comprise a temperature of about 10° C. to about 60° C., about 10° C. to about 55° C., about 15° C. to about 60° C., about 20° C. to about 60° C., about 20° C. to about 55° C., about 25° C. to about 55° C., or about 30° C. to about 50° C. In some embodiments, the suitable reaction conditions comprise a temperature of about 10° C., 15° C., 20° C., 25° C., 30° C., 35° C., 40° C., 45° C., 50° C., 55° C., or 60° C. In some embodiments, the temperature during the enzymatic reaction can be maintained at a specific temperature throughout the course of the reaction. In some embodiments, the temperature during the enzymatic reaction can be adjusted over a temperature profile during the course of the reaction.

[0103] In some embodiments, the reaction conditions can comprise a surfactant for stabilizing or enhancing the reaction. Surfactants can comprise non-ionic, cationic, anionic and/or amphiphilic surfactants. Exemplary surfactants, include by way of example and not limitation, nonyl phenoxypolyethoxylethanol (NP40), Triton X-100, polyoxyethylene-stearylamine, cetyltrimethylammonium bromide, sodium oleylamidosulfate, polyoxyethylene-sorbitanmonostearate, hexadecyldimethylamine, etc. Any surfactant that may stabilize or enhance the reaction may be employed. The concentration of the surfactant to be employed in the reaction may be generally from 0.1 to 50 mg/ml, particularly from 1 to 20 mg/ml.

[0104] In some embodiments, the reaction conditions can include an antifoam agent, which aids in reducing or preventing formation of foam in the reaction solution, such as when the reaction solutions are mixed or sparged. Anti-foam agents include non-polar oils (e.g., minerals, silicones, etc.), polar oils (e.g., fatty acids, alkyl amines, alkyl amides, alkyl sulfates, etc.), and hydrophobic (e.g., treated silica, polypropylene, etc.), some of which also function as surfactants. Exemplary anti-foam agents include, Y-308 (Dow Corning), poly-glycol copolymers, oxy/ethoxylated alcohols, and polydimethylsiloxanes. In some embodiments, the anti-foam can be present at about 0.001% (v/v) to about 5% (v/v), about 0.01% (v/v) to about 5% (v/v), about 0.1% (v/v) to about 5% (v/v), or about 0.1% (v/v) to about 2% (v/v). In some embodiments, the anti-foam agent can be present at about 0.001% (v/v), about 0.01% (v/v), about 0.1% (v/v), about 0.5% (v/v), about 1% (v/v), about 2% (v/v), about 3% (v/v), about 4% (v/v), or about 5% (v/v) or more as desirable to promote the reaction.

[0105] The quantities of reactants used in the kinase reaction will generally vary depending on the quantities of product desired, and concomitantly the amount of indanone substrate employed. Those having ordinary skill in the art will readily understand how to vary these quantities to tailor them to the desired level of productivity and scale of production.

[0106] In some embodiments, the order of addition of reactants is not critical. The reactants may be added together at the same time to a solvent (e.g., monophasic solvent, biphasic aqueous co-solvent system, and the like), or alternatively, some of the reactants may be added separately, and some together at different time points. For example, the cofactor, co-substrate, engineered P450-BM3 enzyme, and substrate may be added first to the solvent.

[0107] The solid reactants (e.g., enzyme, salts, etc.) may be provided to the reaction in a variety of different forms, including powder (e.g., lyophilized, spray dried, and the like), solution, emulsion, suspension, and the like. The reactants can be readily lyophilized or spray dried using methods and equipment that are known to those having ordinary skill in the art. For example, the protein solution can be frozen at −80° C. in small aliquots, then added to a pre-chilled lyophilization chamber, followed by the application of a vacuum.

[0108] For improved mixing efficiency when an aqueous co-solvent system is used, the engineered P450-BM3 polypeptide, and cofactor may be added and mixed into the aqueous phase first. The organic phase may then be added and mixed in, followed by addition of the substrate and co-substrate. Alternatively, the substrate may be premixed in the organic phase, prior to addition to the aqueous phase.

[0109] The monooxygenation process is generally allowed to proceed until further conversion of substrate to product does not change significantly with reaction time (e.g., less than 10% of substrate being converted, or less than 5% of substrate being converted). In some embodiments, the reaction is allowed to proceed until there is complete or near complete conversion of substrate to product. Transformation of substrate to product can be monitored using known methods by detecting substrate and/or product, with or without derivatization. Suitable analytical methods include gas chromatography, HPLC, MS, and the like.

[0110] In further embodiments of the processes for converting substrate compound to product compound using the engineered P450-BM3 polypeptides, the suitable reaction conditions can comprise an initial substrate loading to the reaction solution which is then contacted by the polypeptide. This reaction solution is then further supplemented with additional substrate compound as a continuous or batchwise addition over time at a rate of at least about 1 g/L/h, at least about 2 g/L/h, at least about 4 g/L/h, at least about 6 g/L/h, or higher. Thus, according to these suitable reaction conditions, polypeptide is added to a solution having an initial substrate loading of at least about 20 g/L, 30 g/L, or 40 g/L. This addition of polypeptide is then followed by continuous addition of further substrate to the solution at a rate of about 2 g/L/h, 4 g/L/h, or 6 g/L/h until a much higher final substrate loading of at least about 30 g/L, 40 g/L, 50 g/L, 60 g/L, 70 g/L, 100 g/L, 150 g/L, 200 g/L or more, is reached. Accordingly, in some embodiments of the process, the suitable reaction conditions comprise addition of the polypeptide to a solution having an initial substrate loading of at least about 20 g/L, 30 g/L, or 40 g/L followed by addition of further substrate to the solution at a rate of about 2 g/L/h, 4 g/L/h, or 6 g/L/h until a final substrate loading of at least about 30 g/L, 40 g/L, 50 g/L, 60 g/L, 70 g/L, 100 g/L or more, is reached. This substrate supplementation reaction condition allows for higher substrate loadings to be achieved while maintaining high rates of conversion of substrate to product of at least about 50%, 60%, 70%, 80%, 90% or greater conversion of substrate.

[0111] In some embodiments, a recycling system is used to recycle NADPH to NADP+. In some embodiments, the recycling system comprises glucose dehydrogenase and glucose. In some embodiments, the recycling system comprises phosphite dehydrogenase and phosphite.

[0112] In some embodiments of the processes, the reaction using an engineered P450-BM3 polypeptide comprises the following suitable reaction conditions: (a) substrate loading at about 1-5 g/L; (b) about 0.05-2 g/L of the engineered polypeptide; (c) 20-200 mm NADP+; (d) a pH of about 7-9; (c) 5%-20% solvent (acetonitrile or DMSO); (h) temperature of about 25-30° C.; and (i) reaction time of about 3 hrs.

[0113] In some embodiments of the processes, the reaction using an engineered P450-BM3 polypeptide comprises the following suitable reaction conditions; (a) substrate loading at about 1.0 g/L; (b) about 1.0 −5.0 g/L of the engineered polypeptide; (c) NADP+ at the same concentration as the substrate; (d) a pH of about 8; (c) 0-20% DMSO; (f) temperature of about 30° C.; and (g) reaction time of about 3-24 hrs.

[0114] In some embodiments, additional reaction components or additional techniques are carried out to supplement the reaction conditions. These can include taking measures to stabilize or prevent inactivation of the enzyme, reduce product inhibition, shift reaction equilibrium to product formation.

[0115] In further embodiments, any of the above described process for the conversion of substrate compound to product compound can further comprise one or more steps selected from: extraction; isolation; purification; and crystallization of product compound. Methods, techniques, and protocols for extracting, isolating, purifying, and/or crystallizing the product from biocatalytic reaction mixtures produced by the above disclosed processes are known to the ordinary artisan and/or accessed through routine experimentation. Additionally, illustrative methods are provided in the Examples below.

[0116] Various features and embodiments of the invention are illustrated in the following representative examples, which are intended to be illustrative, and not limiting.

[0117] In light of the guidance provided herein, it is further contemplated that any of the exemplary engineered polypeptides can be used as the starting amino acid sequence for synthesizing other engineered P450-BM3 polypeptides, for example by subsequent rounds of evolution by adding new combinations of various amino acid differences from other polypeptides and other residue positions described herein. Further improvements may be generated by including amino acid differences at residue positions that had been maintained as unchanged throughout earlier rounds of evolution.

### Polynucleotides Encoding Engineered Polypeptides, Expression Vectors and Host Cells

[0118] The present invention provides polynucleotides encoding the engineered P450-BM3 polypeptides described herein. In some embodiments, the polynucleotides are operatively linked to one or more heterologous regulatory sequences that control gene expression to create a recombinant polynucleotide capable of expressing the polypeptide. Expression constructs containing a heterologous polynucleotide encoding the engineered P450-BM3 polypeptides can be introduced into appropriate host cells to express the corresponding P450-BM3 polypeptide.

[0119] As will be apparent to the skilled artisan, availability of a protein sequence and the knowledge of the codons corresponding to the various amino acids provide a description of all the polynucleotides capable of encoding the subject polypeptides. The degeneracy of the genetic code, where the same amino acids are encoded by alternative or synonymous codons, allows an extremely large number of nucleic acids to be made, all of which encode the engineered P450-BM3 polypeptide. Thus, having knowledge of a particular amino acid sequence, those skilled in the art could make any number of different nucleic acids by simply modifying the sequence of one or more codons in a way which does not change the amino acid sequence of the protein. In this regard, the present invention specifically contemplates each and every possible variation of polynucleotides that could be made encoding the polypeptides described herein by selecting combinations based on the possible codon choices, and all such variations are to be considered specifically disclosed for any polypeptide described herein, including the variants provided in Tables 2.2, 4.1, 5.1, 5.2, 6.1, 7.1, 7.3, 8.1, 9.1, 10.1, 11.2, 12.1, 12.2, 12.3, 13.1, and 14.1. as well as SEQ ID NOS: 22, 92, 96, 142, 162, 216, 288, 314, 546, 578, or 680.

[0120] In various embodiments, the codons are preferably selected to fit the host cell in which the protein is being produced. For example, preferred codons used in bacteria are used for expression in bacteria. Consequently, codon optimized polynucleotides encoding the engineered P450-BM3 polypeptides contain preferred codons at about 40%, 50%, 60%, 70%, 80%, or greater than 90% of codon positions of the full length coding region.

[0121] In some embodiments, as described above, the polynucleotide encodes an engineered polypeptide having P450-BM3 activity with the properties disclosed herein, wherein the polypeptide comprises an amino acid sequence having at least 80%, 85%, 86%, 87%, 88%, 89%, 90%, 91%, 92%, 93%, 94%, 95%, 96%, 97%, 98%, 99% or more identity to a reference sequence (e.g., SEQ ID NO: 2, 92, 96, 142, 162, 216, 288, 314, 546, 578, or 680)), or the amino acid sequence of any variant as disclosed in any of Tables 2.2, 4.1, 5.1, 5.2, 6.1, 7.1, 7.3, 8.1, 9.1, 10.1, 11.2, 12.1, 12.2, 12.3, 13.1, and 14.1, and one or more residue differences as compared to the reference polypeptide of SEQ ID NO: 2, 92, 96, 142, 162, 216. 288, 314, 546, 578, or 680, or the amino acid sequence of any variant as disclosed in any of Tables 2.2, 4.1, 5.1, 5.2, 6.1, 7.1, 7.3, 8.1, 9.1, 10.1, 11.2, 12.1, 12.2, 12.3, 13.1, and 14.1 (for example 1, 2, 3, 4, 5, 6, 7, 8, 9, 10 or more amino acid residue positions). In some embodiments, the reference sequence is selected from SEQ ID NO: 2, 92, 96, 142, 162, 216, 288, 314, 546, 578, or 680).

[0122] In some embodiments, the polynucleotides are capable of hybridizing under highly stringent conditions to a reference polynucleotide sequence selected from SEQ ID NO: 1, 91, 95, 141, 161, 215, 287, 313, 545, 577, or 679, or a complement thereof, or a polynucleotide sequence encoding any of the variant P450-BM3 polypeptides provided herein. In some embodiments, the polynucleotide capable of hybridizing under highly stringent conditions encodes a P450-BM3 polypeptide comprising an amino acid sequence that has one or more residue differences as compared to SEQ ID NO: 2, 92, 96, 142, 162, 216, 288, 314, 546, 578, or 680.

[0123] In some embodiments, the polynucleotides are capable of hybridizing under highly stringent conditions to a reference polynucleotide sequence selected from any polynucleotide sequence provided herein, or a complement thereof, or a polynucleotide sequence encoding any of the variant enzyme polypeptides provided herein. In some embodiments, the polynucleotide capable of hybridizing under highly stringent conditions encodes an enzyme polypeptide comprising an amino acid sequence that has one or more residue differences as compared to a reference sequence.

[0124] In some embodiments, an isolated polynucleotide encoding any of the engineered enzyme polypeptides herein is manipulated in a variety of ways to facilitate expression of the enzyme polypeptide. In some embodiments, the polynucleotides encoding the enzyme polypeptides comprise expression vectors where one or more control sequences is present to regulate the expression of the enzyme polynucleotides and/or polypeptides. Manipulation of the isolated polynucleotide prior to its insertion into a vector may be desirable or necessary depending on the expression vector utilized. Techniques for modifying polynucleotides and nucleic acid sequences utilizing recombinant DNA methods are well known in the art. In some embodiments, the control sequences include among others, promoters, leader sequences, polyadenylation sequences, propeptide sequences, signal peptide sequences, and transcription terminators. In some embodiments, suitable promoters are selected based on the host cells selection. For bacterial host cells, suitable promoters for directing transcription of the nucleic acid constructs of the present disclosure, include, but are not limited to promoters obtained from the E. coli lac operon, Streptomyces coelicolor agarase gene (dagA), Bacillus subtilis levansucrase gene (sacB), Bacillus licheniformis alpha-amylase gene (amyL), Bacillus stearothermophilus maltogenic amylase gene (amy M), Bacillus amyloliquefaciens alpha-amylase gene (amyQ), Bacillus licheniformis penicillinase gene (penP), Bacillus subtilis xylA and xylB genes, and prokaryotic beta-lactamase gene (See e.g., Villa-Kamaroff et al., Proc. Natl Acad. Sci. USA 75: 3727-3731 [1978]), as well as the tac promoter (See e.g., DeBoer et al,. Proc. Natl Acad. Sci. USA 80: 21-25 [1983]). Exemplary promoters for filamentous fungal host cells. include, but are not limited to promoters obtained from the genes for Aspergillus oryzae TAKA amylase, Rhizomucor miehei aspartic proteinase, Aspergillus niger neutral alpha-amylase, Aspergillus niger acid stable alpha-amylase, Aspergillus niger or Aspergillus awamori glucoamylase (glaA), Rhizomucor miehei lipase, Aspergillus oryzae alkaline protease, Aspergillus oryzae triose phosphate isomerase, Aspergillus nidulans acetamidase, and Fusarium oxysporum trypsin-like protease (See e.g., WO 96/00787), as well as the NA2-tpi promoter (a hybrid of the promoters from the genes for Aspergillus niger neutral alpha-amy lase and Aspergillus oryzae triose phosphate isomerase), and mutant, truncated, and hybrid promoters thereof. Exemplary yeast cell promoters can be from the genes for Saccharomyces cerevisiae enolase (ENO-1), Saccharomyces cerevisiae galactokinase (GAL1), Saccharomyces cerevisiae alcohol dehydrogenase/glyceraldehyde-3-phosphate dehydrogenase (ADH2/GAP), and Saccharomyces cerevisiae 3-phosphoglycerate kinase. Other useful promoters for yeast host cells are known in the art (See e.g., Romanos et al., Yeast 8:423-488 [1992]).

[0125] In some embodiments, the control sequence is also a suitable transcription terminator sequence (i.e., a sequence recognized by a host cell to terminate transcription). In some embodiments, the terminator sequence is operably linked to the 3′ terminus of the nucleic acid sequence encoding the enzyme polypeptide. Any suitable terminator which is functional in the host cell of choice finds use in the present invention. Exemplary transcription terminators for filamentous fungal host cells can be obtained from the genes for Aspergillus oryzae TAKA amylase. Aspergillus niger glucoamylase. Aspergillus nidulans anthranilate synthase. Aspergillus niger alpha-glucosidase, and Fusarium oxysporum trypsin-like protease. Exemplary terminators for yeast host cells can be obtained from the genes for Saccharomyces cerevisiae enolase, Saccharomyces cerevisiae cytochrome C (CYC1), and Saccharomyces cerevisiae glyceraldehyde-3-phosphate dehydrogenase. Other useful terminators for yeast host cells are known in the art (See e.g., Romanos et al., supra).

[0126] In some embodiments, the control sequence is also a suitable leader sequence (i.e., a non-translated region of an mRNA that is important for translation by the host cell). In some embodiments, the leader sequence is operably linked to the 5′ terminus of the nucleic acid sequence encoding the enzyme polypeptide. Any suitable leader sequence that is functional in the host cell of choice finds use in the present invention. Exemplary leaders for filamentous fungal host cells are obtained from the genes for Aspergillus oryzae TAKA amylase, and Aspergillus nidulans triose phosphate isomerase. Suitable leaders for yeast host cells are obtained from the genes for Saccharomyces cerevisiae enolase (ENO-1), Saccharomyces cerevisiae 3-phosphoglycerate kinase. Saccharomyces cerevisiae alpha-factor, and Saccharomyces cerevisiae alcohol dehydrogenase/glyceraldehyde-3-phosphate dehydrogenase (ADH2/GAP).

[0127] In some embodiments, the control sequence is also a polyadenylation sequence (i.e., a sequence operably linked to the 3′ terminus of the nucleic acid sequence and which, when transcribed, is recognized by the host cell as a signal to add polyadenosine residues to transcribed mRNA). Any suitable polyadenylation sequence which is functional in the host cell of choice finds use in the present invention. Exemplary polyadenylation sequences for filamentous fungal host cells include, but are not limited to the genes for Aspergillus oryzae TAKA amylase, Aspergillus niger glucoamylase, Aspergillus nidulans anthranilate synthase, Fusarium oxysporum trypsin-like protease, and Aspergillus niger alpha-glucosidase. Useful polyadenylation sequences for yeast host cells are known (See e.g., Guo and Sherman, Mol. Cell. Bio., 15:5983-5990 [1995]).

[0128] In some embodiments, the control sequence is also a signal peptide (i.e., a coding region that codes for an amino acid sequence linked to the amino terminus of a polypeptide and directs the encoded polypeptide into the cell's secretory pathway). In some embodiments, the 5′ end of the coding sequence of the nucleic acid sequence inherently contains a signal peptide coding region naturally linked in translation reading frame with the segment of the coding region that encodes the secreted polypeptide. Alternatively. in some embodiments, the 5′ end of the coding sequence contains a signal peptide coding region that is foreign to the coding sequence. Any suitable signal peptide coding region which directs the expressed polypeptide into the secretory pathway of a host cell of choice finds use for expression of the engineered polypeptide(s). Effective signal peptide coding regions for bacterial host cells are the signal peptide coding regions that include, but are not limited to those obtained from the genes for Bacillus NCIB 11837 maltogenic amylase. Bacillus stearothermophilus alpha-amylase. Bacillus licheniformis subtilisin. Bacillus licheniformis beta-lactamase. Bacillus stearothermophilus neutral proteases (nprT, nprS, nprM), and Bacillus subtilis prsA. Further signal peptides are known in the art (See e.g., Simonen and Palva, Microbiol. Rev., 57:109-137 [1993]). In some embodiments, effective signal peptide coding regions for filamentous fungal host cells include, but are not limited to the signal peptide coding regions obtained from the genes for Aspergillus oryzae TAKA amylase. Aspergillus niger neutral amylase, Aspergillus niger glucoamylase, Rhizomucor miehei aspartic proteinase, Humicola insolens cellulase, and Humicola lanuginosa lipase. Useful signal peptides for yeast host cells include, but are not limited to those from the genes for Saccharomyces cerevisiae alpha-factor and Saccharomyces cerevisiae invertase.

[0129] In some embodiments, the control sequence is also a propeptide coding region that codes for an amino acid sequence positioned at the amino terminus of a polypeptide. The resultant polypeptide is referred to as a “proenzyme,” “propolypeptide,” or “zymogen,” A propolypeptide can be converted to a mature active polypeptide by catalytic or autocatalytic cleavage of the propeptide from the propolypeptide. The propeptide coding region may be obtained from any suitable source, including, but not limited to the genes for Bacillus subtilis alkaline protease (aprE), Bacillus subtilis neutral protease (nprT), Saccharomyces cerevisiae alpha-factor, Rhizomucor miehei aspartic proteinasc, and Myceliophthora thermophila lactase (See e.g., WO 95/33836). Where both signal peptide and propeptide regions are present at the amino terminus of a polypeptide, the propeptide region is positioned next to the amino terminus of a polypeptide and the signal peptide region is positioned next to the amino terminus of the propeptide region.

[0130] In some embodiments, regulatory sequences are also utilized. These sequences facilitate the regulation of the expression of the polypeptide relative to the growth of the host cell. Examples of regulatory systems are those that cause the expression of the gene to be turned on or off in response to a chemical or physical stimulus, including the presence of a regulatory compound. In prokaryotic host cells, suitable regulatory sequences include, but are not limited to the lac, tac, and trp operator systems. In yeast host cells, suitable regulatory systems include, but are not limited to the ADH2 system or GALI system. In filamentous fungi, suitable regulatory sequences include, but are not limited to the TAKA alpha-amylase promoter, Aspergillus niger glucoamylase promoter, and Aspergillus oryzae glucoamylase promoter.

[0131] In another aspect, the present invention is directed to a recombinant expression vector comprising a polynucleotide encoding an engineered enzyme polypeptide, and one or more expression regulating regions such as a promoter and a terminator, a replication origin, etc., depending on the type of hosts into which they are to be introduced. In some embodiments, the various nucleic acid and control sequences described herein are joined together to produce recombinant expression vectors which include one or more convenient restriction sites to allow for insertion or substitution of the nucleic acid sequence encoding the enzyme polypeptide at such sites. Alternatively, in some embodiments, the nucleic acid sequence of the present invention is expressed by inserting the nucleic acid sequence or a nucleic acid construct comprising the sequence into an appropriate vector for expression. In some embodiments involving the creation of the expression vector, the coding sequence is located in the vector so that the coding sequence is operably linked with the appropriate control sequences for expression.

[0132] The recombinant expression vector may be any suitable vector (e.g., a plasmid or virus), that can be conveniently subjected to recombinant DNA procedures and bring about the expression of the enzyme polynucleotide sequence. The choice of the vector typically depends on the compatibility of the vector with the host cell into which the vector is to be introduced. The vectors may be linear or closed circular plasmids.

[0133] In some embodiments, the expression vector is an autonomously replicating vector (i.e., a vector that exists as an extra-chromosomal entity, the replication of which is independent of chromosomal replication, such as a plasmid, an extra-chromosomal element, a minichromosome, or an artificial chromosome). The vector may contain any means for assuring self-replication. In some alternative embodiments, the vector is one in which, when introduced into the host cell, it is integrated into the genome and replicated together with the chromosome(s) into which it has been integrated. Furthermore, in some embodiments, a single vector or plasmid, or two or more vectors or plasmids which together contain the total DNA to be introduced into the genome of the host cell, and/or a transposon is utilized.

[0134] In some embodiments, the expression vector contains one or more selectable markers, which permit easy selection of transformed cells. A “selectable marker” is a gene, the product of which provides for biocide or viral resistance, resistance to heavy metals, prototrophy to auxotrophs, and the like. Examples of bacterial selectable markers include, but are not limited to the dal genes from Bacillus subtilis or Bacillus licheniformis, or markers, which confer antibiotic resistance such as ampicillin, kanamycin, chloramphenicol or tetracycline resistance. Suitable markers for yeast host cells include, but are not limited to ADE2, HIS3, LEU2, LYS2, MET3, TRP1, and URA3. Selectable markers for use in filamentous fungal host cells include, but are not limited to, amdS (acetamidase: e.g., from A. nidulans or A. orzyae), argB (ornithine carbamoyltransferases), bar (phosphinothricin acetyltransferase: e.g., from S. hygroscopicus), hph (hygromycin phosphotransferase), niaD (nitrate reductase), pyrG (orotidine-5′-phosphate decarboxylase: e.g., from A. nidulans or A. orzyae), sC (sulfate adenyltransferase), and trpC (anthranilate synthase), as well as equivalents thereof.

[0135] In another aspect, the present invention provides a host cell comprising at least one polynucleotide encoding at least one engineered enzyme polypeptide of the present invention, the polynucleotide(s) being operatively linked to one or more control sequences for expression of the engineered enzyme enzyme(s) in the host cell. Host cells suitable for use in expressing the polypeptides encoded by the expression vectors of the present invention are well known in the art and include but are not limited to, bacterial cells, such as E. coli, Vibrio fluvialis, Streptomyces and Salmonella typhimurium cells; fungal cells, such as yeast cells (e.g., Saccharomyces cerevisiae or Pichia pastoris (ATCC Accession No. 201178)): insect cells such as Drosophila S2 and Spodoptera Sf9 cells; animal cells such as CHO, COS, BHK, 293, and Bowes melanoma cells; and plant cells. Exemplary host cells also include various Escherichia coli strains (e.g., W3110) (ΔfhuA) and BL21). Examples of bacterial selectable markers include, but are not limited to the dal genes from Bacillus subtilis or Bacillus licheniformis, or markers, which confer antibiotic resistance such as ampicillin, kanamycin, chloramphenicol, and/or tetracycline resistance.

[0136] In some embodiments, the expression vectors of the present invention contain an element(s) that permits integration of the vector into the host cell's genome or autonomous replication of the vector in the cell independent of the genome. In some embodiments involving integration into the host cell genome, the vectors rely on the nucleic acid sequence encoding the polypeptide or any other element of the vector for integration of the vector into the genome by homologous or nonhomologous recombination.

[0137] In some alternative embodiments, the expression vectors contain additional nucleic acid sequences for directing integration by homologous recombination into the genome of the host cell. The additional nucleic acid sequences enable the vector to be integrated into the host cell genome at a precise location(s) in the chromosome(s). To increase the likelihood of integration at a precise location, the integrational elements preferably contain a sufficient number of nucleotides, such as 100 to 10,000 base pairs, preferably 400) to 10,000 base pairs, and most preferably 800 to 10,000 base pairs, which are highly homologous with the corresponding target sequence to enhance the probability of homologous recombination. The integrational elements may be any sequence that is homologous with the target sequence in the genome of the host cell. Furthermore, the integrational elements may be non-encoding or encoding nucleic acid sequences. On the other hand, the vector may be integrated into the genome of the host cell by non-homologous recombination.

[0138] For autonomous replication, the vector may further comprise an origin of replication enabling the vector to replicate autonomously in the host cell in question. Examples of bacterial origins of replication are P15A ori or the origins of replication of plasmids pBR322, pUC19, pACYC177 (which plasmid has the P15A ori), or pACYC184 permitting replication in E. coli, and pUB110, pE194, or pTA1060 permitting replication in Bacillus. Examples of origins of replication for use in a yeast host cell are the 2 micron origin of replication, ARSI, ARS4, the combination of ARSI and CEN3, and the combination of ARS4 and CEN6. The origin of replication may be one having a mutation which makes its functioning temperature-sensitive in the host cell (See e.g., Ehrlich, Proc. Natl. Acad. Sci. USA 75:1433 [1978]).

[0139] In some embodiments, more than one copy of a nucleic acid sequence of the present invention is inserted into the host cell to increase production of the gene product. An increase in the copy number of the nucleic acid sequence can be obtained by integrating at least one additional copy of the sequence into the host cell genome or by including an amplifiable selectable marker gene with the nucleic acid sequence where cells containing amplified copies of the selectable marker gene, and thereby additional copies of the nucleic acid sequence, can be selected for by cultivating the cells in the presence of the appropriate selectable agent.

[0140] Many of the expression vectors for use in the present invention are commercially available. Suitable commercial expression vectors include, but are not limited to the p3xFLAG™ expression vectors (Sigma-Aldrich Chemicals), which include a CMV promoter and hGH polyadenylation site for expression in mammalian host cells and a pBR322 origin of replication and ampicillin resistance markers for amplification in E. coli. Other suitable expression vectors include, but are not limited to pBluescriptII SK(-) and pBK-CMV (Stratagene), and plasmids derived from pBR322 (Gibco BRL), pUC (Gibco BRL), pREP4, pCEP4 (Invitrogen) or pPoly (See e.g., Lathe et al., Gene 57:193-201 [1987]).

[0141] Thus, in some embodiments, a vector comprising a sequence encoding at least one variant engineered P450)-BM3 polypeptide is transformed into a host cell in order to allow propagation of the vector and expression of the variant engineered P450-BM3 polypeptide(s). In some embodiments, the variant engineered P450-BM3 polypeptides are post-translationally modified to remove the signal peptide and, in some cases, may be cleaved after secretion. In some embodiments, the transformed host cell described above is cultured in a suitable nutrient medium under conditions permitting the expression of the variant engineered P450-BM3 polypeptide(s). Any suitable medium useful for culturing the host cells finds use in the present invention, including, but not limited to minimal or complex media containing appropriate supplements. In some embodiments, host cells are grown in HTP media. Suitable media are available from various commercial suppliers or may be prepared according to published recipes (e.g., in catalogues of the American Type Culture Collection).

[0142] In another aspect, the present invention provides host cells comprising a polynucleotide encoding an improved engineered P450-BM3 polypeptide provided herein, the polynucleotide being operatively linked to one or more control sequences for expression of the engineered P450-BM3 polypeptide in the host cell. Host cells for use in expressing the engineered P450-BM3 polypeptides encoded by the expression vectors of the present invention are well known in the art and include but are not limited to, bacterial cells, such as E. coli, Bacillus megaterium, Lactobacillus kefir, Streptomyces and Salmonella typhimurium cells; fungal cells, such as yeast cells (e.g., Saccharomyces cerevisiae or Pichia pastoris (ATCC Accession No, 201178)); insect cells such as Drosophila S2 and Spodoptera Sf9 cells; animal cells such as CHO, COS, BHK, 293, and Bowes melanoma cells; and plant cells. Appropriate culture media and growth conditions for the above-described host cells are well known in the art.

[0143] Polynucleotides for expression of the engineered P450-BM3 polypeptide may be introduced into cells by various methods known in the art. Techniques include among others, electroporation, biolistic particle bombardment, liposome mediated transfection, calcium chloride transfection, and protoplast fusion. Various methods for introducing polynucleotides into cells are known to those skilled in the art.

[0144] In some embodiments, the host cell is a eukaryotic cell. Suitable eukaryotic host cells include, but are not limited to, fungal cells, algal cells, insect cells, and plant cells. Suitable fungal host cells include, but are not limited to, Ascomycota, Basidiomycota, Deuteromycota, Zygomycota, Fungi imperfecti. In some embodiments, the fungal host cells are yeast cells and filamentous fungal cells. The filamentous fungal host cells of the present invention include all filamentous forms of the subdivision Eumycotina and Oomycota. Filamentous fungi are characterized by a vegetative mycelium with a cell wall composed of chitin, cellulose and other complex polysaccharides. The filamentous fungal host cells of the present invention are morphologically distinct from yeast.

[0145] In some embodiments of the present invention, the filamentous fungal host cells are of any suitable genus and species, including, but not limited to Achlya, Acremonium, Aspergillus, Aureobasidium, Bjerkandera, Ceriporiopsis, Cephalosporium, Chrysosporium, Cochliobolus, Corynascus, Cryphonectria, Cryptococcus, Coprinus, Coriolus, Diplodia, Endothia, Fusarium, Gibberella, Gliocladium, Humicola, Hypocrea, Myceliophthora, Mucor, Neurospora, Penicillium, Podospora, Phlebia, Piromyces, Pyricularia, Rhizomucor, Rhizopus, Schizophyllum, Scytalidium, Sporotrichum, Talaromyces, Thermoascus, Thielavia, Trametes, Tolypocladium, Trichoderma, Verticillium, and/or Volvariella, and/or telcomorphs, or anamorphs, and synonyms, basionyms, or taxonomic equivalents thereof.

[0146] In some embodiments of the present invention, the host cell is a yeast cell, including but not limited to cells of Candida, Hansenula, Saccharomyces, Schizosaccharomyces, Pichia, Kluyveromyces, or Yarrowia species. In some embodiments of the present invention, the yeast cell is Hansenula polymorpha, Saccharomyces cerevisiae, Saccharomyces carlsbergensis, Saccharomyces diastaticus, Saccharomyces norbensis, Saccharomyces kluyveri, Schizosaccharomyces pombe, Pichia pastoris, Pichia finlandica, Pichia trehalophila, Pichia kodamae, Pichia membranaefaciens, Pichia opuntiae, Pichia thermotolerans, Pichia salictaria, Pichia quercuum, Pichia pijperi, Pichia stipitis, Pichia methanolica, Pichia angusta, Kluyveromyces lactis, Candida albicans, or Yarrowia lipolytica.

[0147] In some embodiments of the invention, the host cell is an algal cell such as Chlamydomonas (e.g., C. reinhardtii) and Phormidium (P. sp. ATCC29409).

[0148] In some other embodiments, the host cell is a prokaryotic cell. Suitable prokaryotic cells include, but are not limited to Gram-positive, Gram-negative and Gram-variable bacterial cells. Any suitable bacterial organism finds use in the present invention, including but not limited to Agrobacterium, Alicyclobacillus, Anabaena, Anacystis, Acinetobacter, Acidothermus, Arthrobacter, Azobacter, Bacillus, Bifidobacterium, Brevibacterium, Butyrivibrio, Buchnera, Campestris, Campylobacter, Clostridium, Corynebacterium, Chromatium, Coprococcus, Escherichia, Enterococcus, Enterobacter, Erwinia, Fusobacterium, Faecalibacterium, Francisella, Flavobacterium, Geobacillus, Haemophilus, Helicobacter, Klebsiella, Lactobacillus, Lactococcus, Ilyobacter, Micrococcus, Microbacterium, Mesorhizobium, Methylobacterium, Methylobacterium, Mycobacterium, Neisseria, Pantoea, Pseudomonas, Prochlorococcus, Rhodobacter, Rhodopseudomonas, Rhodopseudomonas, Roseburia, Rhodospirillum, Rhodococcus, Scenedesmus, Streptomyces, Streptococcus, Synecoccus, Saccharomonospora, Staphylococcus, Serratia, Salmonella, Shigella, Thermoanaerobacterium, Tropheryma, Tularensis, Temecula, Thermosynechococcus, Thermococcus, Ureaplasma, Xanthomonas, Xylella, Yersinia and Zymomonas. In some embodiments, the host cell is a species of Agrobacterium, Acinetobacter, Azobacter, Bacillus, Bifidobacterium, Buchnera, Geobacillus, Campylobacter, Clostridium, Corynebacterium, Escherichia, Enterococcus, Erwinia, Flavobacterium, Lactobacillus, Lactococcus, Pantoea, Pseudomonas, Staphylococcus, Salmonella, Streptococcus, Streptomyces, or Zymomonas. In some embodiments, the bacterial host strain is non-pathogenic to humans. In some embodiments the bacterial host strain is an industrial strain. Numerous bacterial industrial strains are known and suitable in the present invention. In some embodiments of the present invention, the bacterial host cell is an Agrobacterium species (e.g., A. radiobacter, A. rhizogenes, and A. rubi). In some embodiments of the present invention, the bacterial host cell is an Arthrobacter species (e.g., A. aurescens, A. citreus, A. globiformis, A. hydrocarboglutamicus, A. mysorens, A. nicotianae, A. paraffineus, A. protophonniae, A. roseoparaffinus, A. sulfureus, and A. ureafaciens). In some embodiments of the present invention, the bacterial host cell is a Bacillus species (e.g., B. thuringensis, B. anthracis, B. megaterium, B. subtilis, B. lentus, B. circulans, B. pumilus, B. lautus, B. coagulans, B. brevis, B. firmus, B, alkaophius. B. licheniformis. B. clausii, B. stearothermophilus. B. halodurans, and B. amyloliquefaciens). In some embodiments, the host cell is an industrial Bacillus strain including but not limited to B. subtilis, B. pumilus, B. licheniformis, B. megaterium, B. clausii, B. stearothermophilus, or B. amyloliquefaciens. In some embodiments, the Bacillus host cells are B. subtilis, B. licheniformis, B. megaterium, B. stearothermophilus, and/or B. amyloliquefaciens. In some embodiments, the bacterial host cell is a Clostridium species (e.g., C. acetobutylicum, C. tetani E88, C. lituseburense, C. saccharobutylicum, C. perfringens, and C. beijerinckii). In some embodiments, the bacterial host cell is a Corynebacterium species (e.g., C. glutamicum and C. acetoacidophilum). In some embodiments the bacterial host cell is an Escherichia species (e.g., E. coli). In some embodiments, the host cell is Escherichia coli W3110. In some embodiments, the bacterial host cell is an Erwinia species (e.g., E. uredovora, E. carotovora, E. ananas, E. herbicola, E. punctata, and E. terreus). In some embodiments, the bacterial host cell is a Pantoea species (e.g., P. citrea, and P. agglomerans). In some embodiments the bacterial host cell is a Pseudomonas species (e.g., P. putida, P. aeruginosa, P. mevalonii, and P. sp. D-01 10). In some embodiments, the bacterial host cell is a Streptococcus species (e.g., S. equisimiles, S. pyogenes, and S. uberis). In some embodiments, the bacterial host cell is a Streptomyces species (e.g., S. ambofaciens, S. achromogenes, S. avermitilis, S. coelicolor, S. aureofaciens, S. aureus, S. fungicidicus, S. griseus, and S. lividans). In some embodiments, the bacterial host cell is a Zymomonas species (e.g., Z. mobilis, and Z. lipolytica).

[0149] Many prokaryotic and eukaryotic strains that find use in the present invention are readily available to the public from a number of culture collections such as American Type Culture Collection (ATCC). Deutsche Sammlung von Mikroorganismen und Zellkulturen GmbH (DSM). Centraalbureau Voor Schimmelcultures (CBS), and Agricultural Research Service Patent Culture Collection. Northern Regional Research Center (NRRL).

[0150] In some embodiments, host cells are genetically modified to have characteristics that improve protein secretion. protein stability and/or other properties desirable for expression and/or secretion of a protein. Genetic modification can be achieved by genetic engineering techniques and/or classical microbiological techniques (e.g., chemical or UV mutagenesis and subsequent selection). Indeed, in some embodiments, combinations of recombinant modification and classical selection techniques are used to produce the host cells. Using recombinant technology, nucleic acid molecules can be introduced, deleted, inhibited or modified, in a manner that results in increased yields of engineered P450-BM3 variant(s) within the host cell and/or in the culture medium. For example, knockout of Alp1 function results in a cell that is protease deficient, and knockout of pyr5 function results in a cell with a pyrimidine deficient phenotype. In one genetic engineering approach, homologous recombination is used to induce targeted gene modifications by specifically targeting a gene in vivo to suppress expression of the encoded protein. In alternative approaches, siRNA, antisense and/or ribozyme technology find use in inhibiting gene expression. A variety of methods are known in the art for reducing expression of protein in cells, including, but not limited to deletion of all or part of the gene encoding the protein and site-specific mutagenesis to disrupt expression or activity of the gene product. (See e.g., Chaveroche et al., Nucl. Acids Res., 28:22 e97 [2000]; Cho et al., Molec. Plant Microbe Interact., 19:7-15 [2006]; Maruyama and Kitamoto, Biotechnol Lett., 30:1811-1817 [2008]; Takahashi et al., Mol. Gen. Genom., 272: 344-352 [2004]; and You et al., Arch. Microbiol., 191:615-622 [2009], all of which are incorporated by reference herein). Random mutagenesis, followed by screening for desired mutations also finds use (See e.g., Combier et al., FEMS Microbiol. Lett., 220:141-8 [2003]; and Firon et al., Eukary. Cell 2:247-55 [2003], both of which are incorporated by reference).

[0151] Introduction of a vector or DNA construct into a host cell can be accomplished using any suitable method known in the art, including but not limited to calcium phosphate transfection, DEAE-dextran mediated transfection. PEG-mediated transformation, electroporation, or other common techniques known in the art. In some embodiments, the Escherichia coli expression vector pCK100900i (See. U.S. Pat. No. 9,714,437. which is hereby incorporated by reference) finds use.

[0152] In some embodiments, the engineered host cells (i.e., “recombinant host cells”) of the present invention are cultured in conventional nutrient media modified as appropriate for activating promoters, selecting transformants, or amplifying the engineered P450-BM3 polynucleotide. Culture conditions, such as temperature, pH and the like, are those previously used with the host cell selected for expression, and are well-known to those skilled in the art. As noted, many standard references and texts are available for the culture and production of many cells, including cells of bacterial, plant, animal (especially mammalian) and archaebacterial origin.

[0153] In some embodiments, cells expressing the variant engineered P450-BM3 polypeptides of the invention are grown under batch or continuous fermentations conditions. Classical “batch fermentation” is a closed system, wherein the compositions of the medium is set at the beginning of the fermentation and is not subject to artificial alternations during the fermentation. A variation of the batch system is a “fed-batch fermentation” which also finds use in the present invention. In this variation, the substrate is added in increments as the fermentation progresses. Fed-batch systems are useful when catabolite repression is likely to inhibit the metabolism of the cells and where it is desirable to have limited amounts of substrate in the medium. Batch and fed-batch fermentations are common and well known in the art. “Continuous fermentation” is an open system where a defined fermentation medium is added continuously to a bioreactor and an equal amount of conditioned medium is removed simultaneously for processing. Continuous fermentation generally maintains the cultures at a constant high density where cells are primarily in log phase growth. Continuous fermentation systems strive to maintain steady state growth conditions. Methods for modulating nutrients and growth factors for continuous fermentation processes as well as techniques for maximizing the rate of product formation are well known in the art of industrial microbiology.

[0154] In some embodiments of the present invention, cell-free transcription/translation systems find use in producing variant engineered P450-BM3 polypeptides(s). Several systems are commercially available, and the methods are well-known to those skilled in the art.

[0155] The present invention provides methods of making variant engineered P450-BM3 polypeptides or biologically active fragments thereof. In some embodiments, the method comprises: providing a host cell transformed with a polynucleotide encoding an amino acid sequence that comprises at least about 70% (or at least about 75%, at least about 80%, at least about 85%, at least about 90%, at least about 95%, at least about 96%, at least about 97%, at least about 98%, or at least about 99%) sequence identity to SEQ ID NO: 2, 92, 96, 142, 162, 216, 288, 314, 546, 578, or 680), and comprising at least one mutation as provided herein: culturing the transformed host cell in a culture medium under conditions in which the host cell expresses the encoded variant engineered P450-BM3 polypeptide: and optionally recovering or isolating the expressed variant engineered P450-BM3 polypeptide, and/or recovering or isolating the culture medium containing the expressed variant engineered P450-BM3 polypeptide. In some embodiments, the methods further provide optionally lysing the transformed host cells after expressing the encoded engineered P450-BM3 polypeptide and optionally recovering and/or isolating the expressed variant engineered P450-BM3 polypeptide from the cell lysate. The present invention further provides methods of making a variant engineered P450-BM3 polypeptide comprising cultivating a host cell transformed with a variant engineered P450-BM3 polypeptide under conditions suitable for the production of the variant engineered P450-BM3 polypeptides and recovering the engineered P450-BM3 polypeptide. Typically, recovery or isolation of the engineered P450-BM3 polypeptide is from the host cell culture medium, the host cell or both, using protein recovery techniques that are well known in the art, including those described herein. In some embodiments, host cells are harvested by centrifugation, disrupted by physical or chemical means, and the resulting crude extract retained for further purification. Microbial cells employed in expression of proteins can be disrupted by any convenient method, including, but not limited to freeze-thaw cycling, sonication, mechanical disruption, and/or use of cell lysing agents, as well as many other suitable methods well known to those skilled in the art.

[0156] Engineered P450)-BM3 polypeptides expressed in a host cell can be recovered from the cells and/or the culture medium using any one or more of the techniques known in the art for protein purification, including, among others, lysozyme treatment, sonication, filtration, salting-out, ultra-centrifugation, and chromatography. Suitable solutions for lysing and the high efficiency extraction of proteins from bacteria, such as E. coli, are commercially available under the trade name CelLytic B™ (Sigma-Aldrich). Thus, in some embodiments, the resulting polypeptide is recovered/isolated and optionally purified by any of a number of methods known in the art. For example, in some embodiments. the polypeptide is isolated from the nutrient medium by conventional procedures including, but not limited to, centrifugation, filtration, extraction, spray-drying, evaporation, chromatography (e.g., ion exchange, affinity, hydrophobic interaction, chromatofocusing, and size exclusion), or precipitation. In some embodiments, protein refolding steps are used, as desired, in completing the configuration of the mature protein. In addition, in some embodiments, high performance liquid chromatography (HPLC) is employed in the final purification steps. For example, in some embodiments, methods known in the art, find use in the present invention (See e.g., Parry et al., Biochem. J., 353:117 [2001]; and Hong et al., Appl. Microbiol. Biotechnol., 73:1331 [2007], both of which are incorporated herein by reference). Indeed, any suitable purification methods known in the art find use in the present invention.

[0157] Chromatographic techniques for isolation of the engineered P450-BM3 polypeptides include, but are not limited to reverse phase chromatography, high performance liquid chromatography, ion exchange chromatography, gel electrophoresis, and affinity chromatography. Conditions for purifying a particular enzyme will depend, in part, on factors such as net charge, hydrophobicity, hydrophilicity, molecular weight, molecular shape, etc., are known to those skilled in the art.

[0158] In some embodiments, affinity techniques find use in isolating the improved engineered P450-BM3 polypeptides. For affinity chromatography purification, any antibody which specifically binds the engineered P450-BM3 polypeptide may be used. For the production of antibodies, various host animals. including but not limited to rabbits, mice, rats, etc., may be immunized by injection with the engineered P450-BM3 polypeptide. The engineered P450-BM3 polypeptide may be attached to a suitable carrier, such as BSA, by means of a side chain functional group or linkers attached to a side chain functional group. Various adjuvants may be used to increase the immunological response, depending on the host species, including but not limited to Freund's (complete and incomplete), mineral gels such as aluminum hydroxide, surface active substances such as lysolecithin, pluronic polyols, polyanions, peptides, oil emulsions, keyhole limpet hemocyanin, dinitrophenol, and potentially useful human adjuvants such as BCG (Bacillus Calmette Guerin) and Corynebacterium parvum.

[0159] In some embodiments, the engineered P450-BM3 polypeptides are prepared and used in the form of cells expressing the enzymes, as crude extracts, or as isolated or purified preparations. In some embodiments, the engineered P450-BM3 polypeptides are prepared as lyophilisates, in powder form (e.g., acetone powders), or prepared as enzyme solutions. In some embodiments, the engineered P450-BM3 polypeptides are in the form of substantially pure preparations.

[0160] In some embodiments, the engineered P450-BM3 polypeptides are attached to any suitable solid substrate. Solid substrates include but are not limited to a solid phase, surface, and/or membrane. Solid supports include, but are not limited to organic polymers such as polystyrene, polyethylene, polypropylene, polyfluoroethylene, polyethyleneoxy, and polyacrylamide, as well as co-polymers and grafts thereof. A solid support can also be inorganic, such as glass, silica, controlled pore glass (CPG), reverse phase silica or metal, such as gold or platinum. The configuration of the substrate can be in the form of beads, spheres, particles, granules, a gel, a membrane or a surface. Surfaces can be planar, substantially planar, or non-planar. Solid supports can be porous or non-porous, and can have swelling or non-swelling characteristics. A solid support can be configured in the form of a well, depression, or other container, vessel, feature, or location. A plurality of supports can be configured on an array at various locations, addressable for robotic delivery of reagents, or by detection methods and/or instruments.

[0161] In some embodiments, immunological methods are used to purify engineered P450-BM3 polypeptides variants. In one approach, antibody raised against a wild-type or engineered P450-BM3 polypeptide (e.g., against a polypeptide comprising any of SEQ ID NO: 2, 92, 96, 142, 162, 216, 288, 314, 546, 578, or 680), and/or a variant thereof, and/or an immunogenic fragment thereof) using conventional methods is immobilized on beads, mixed with cell culture media under conditions in which the variant engineered P450-BM3 is bound, and precipitated. In a related approach, immunochromatography finds use.

[0162] In some embodiments, the variant engineered P450-BM3s are expressed as a fusion protein including a non-enzyme portion. In some embodiments, the variant engineered P450-BM3 polypeptide sequence is fused to a purification facilitating domain. As used herein, the term “purification facilitating domain” refers to a domain that mediates purification of the polypeptide to which it is fused. Suitable purification domains include, but are not limited to metal chelating peptides, histidine-tryptophan modules that allow purification on immobilized metals, a sequence which binds glutathione (e.g., GST), a hemagglutinin (HA) tag (corresponding to an epitope derived from the influenza hemagglutinin protein; See e.g., Wilson et al., Cell 37:767 [1984]), maltose binding protein sequences, the FLAG epitope utilized in the FLAGS extension/affinity purification system (e.g., the system available from Immunex Corp), and the like. One expression vector contemplated for use in the compositions and methods described herein provides for expression of a fusion protein comprising a polypeptide of the invention fused to a polyhistidine region separated by an enterokinase cleavage site. The histidine residues facilitate purification on IMIAC (immobilized metal ion affinity chromatography; See e.g., Porath et al., Prot. Exp. Purif., 3:263-281 [1992]) while the enterokinase cleavage site provides a means for separating the variant engineered P450-BM3 polypeptide from the fusion protein. pGEX vectors (Promega) may also be used to express foreign polypeptides as fusion proteins with glutathione S-transferase (GST). In general, such fusion proteins are soluble and can easily be purified from lysed cells by adsorption to ligand-agarose beads (e.g., glutathione-agarose in the case of GST-fusions) followed by elution in the presence of free ligand.

[0163] Accordingly, in another aspect, the present invention provides methods of producing the engineered enzyme polypeptides, where the methods comprise culturing a host cell capable of expressing a polynucleotide encoding the engineered enzyme polypeptide under conditions suitable for expression of the polypeptide. In some embodiments, the methods further comprise the steps of isolating and/or purifying the enzyme polypeptides, as described herein.

[0164] Appropriate culture media and growth conditions for host cells are well known in the art. It is contemplated that any suitable method for introducing polynucleotides for expression of the enzyme polypeptides into cells will find use in the present invention. Suitable techniques include, but are not limited to electroporation, biolistic particle bombardment, liposome mediated transfection, calcium chloride transfection, and protoplast fusion.

[0165] The engineered P450-BM3 with the properties disclosed herein can be obtained by subjecting the polynucleotide encoding the naturally occurring or engineered P450-BM3 polypeptide to mutagenesis and/or directed evolution methods known in the art, and as described herein. An exemplary directed evolution technique is mutagenesis and/or DNA shuffling (See e.g., Stemmer, Proc. Natl. Acad. Sci. USA 91:10747-10751 [1994]; WO 95/22625; WO 97/0078; WO 97/35966; WO 98/27230; WO 00/42651; WO 01/75767 and U.S. Pat. No. 6,537,746). Other directed evolution procedures that can be used include, among others, staggered extension process (StEP), in vitro recombination (See e.g., Zhao et al., Nat. Biotechnol., 16:258-261 [1998]), mutagenic PCR (See e.g., Caldwell et al., PCR Methods Appl., 3:S136-S140) [1994]), and cassette mutagenesis (See e.g., Black et al., Proc. Natl. Acad. Sci. USA 93:3525-3529) [1994]).

[0166] For example, mutagenesis and directed evolution methods can be readily applied to polynucleotides to generate variant libraries that can be expressed, screened, and assayed. Mutagenesis and directed evolution methods are well known in the art (See e.g., U.S. Pat. Nos. 5,605,793, 5,811,238, 5,830,721, 5,834,252, 5,837,458, 5,928,905, 6,096,548, 6,117,679, 6,132,970, 6,165,793, 6,180,406, 6,251,674, 6,265,201, 6,277,638, 6,287,861, 6,287,862, 6,291,242, 6,297,053, 6,303,344, 6,309,883, 6,319,713, 6,319,714, 6,323,030, 6,326,204, 6,335,160, 6,335,198, 6,344,356, 6,352,859, 6,355,484, 6,358,740, 6,358,742, 6,365,377, 6,365,408, 6,368,861, 6,372,497, 6,337,186, 6,376,246, 6,379,964, 6,387,702, 6,391,552, 6,391,640, 6,395,547, 6,406,855, 6,406,910, 6,413,745, 6,413,774, 6,420,175, 6,423,542, 6,426,224, 6,436,675, 6,444,468, 6,455,253, 6,479,652, 6,482,647, 6,483,011, 6,484,105, 6,489,146, 6,500,617, 6,500,639, 6,506,602, 6,506,603, 6,518,065, 6,519,065, 6,521,453, 6,528,311, 6,537,746, 6,573,098, 6,576,467, 6,579,678, 6,586,182, 6,602,986, 6,605,430, 6,613,514, 6,653,072, 6,686,515, 6,703,240, 6,716,631, 6,825,001, 6,902,922, 6,917,882, 6,946,296, 6,961,664, 6,995,017, 7,024,312, 7,058,515, 7,105,297, 7,148,054, 7,220,566, 7,288,375, 7,384,387, 7,421,347, 7,430,477, 7,462,469, 7,534,564, 7,620,500, 7,620,502, 7,629,170, 7,702,464, 7,747,391, 7,747,393, 7,751,986, 7,776,598, 7,783,428, 7,795,030, 7,853,410, 7,868,138, 7,783,428, 7,873,477, 7,873,499, 7,904,249, 7,957,912, 7,981,614, 8,014,961, 8,029,988, 8,048,674, 8,058,001, 8,076,138, 8,108,150, 8,170,806, 8,224,580, 8,377,681, 8,383,346, 8,457,903, 8,504,498, 8,589,085, 8,762,066, 8,768,871, 9,593,326, 9,665,694, 9,684,771, and all related US, as well as PCT and non-US counterparts: Ling et al., Anal. Biochem., 254(2); 157-78 [1997]; Dale et al., Meth. Mol. Biol., 57:369-74 [1996]; Smith. Ann. Rev. Genet., 19:423-462 [1985]; Botstein et al., Science, 229:1193-1201 [1985]; Carter, Biochem. J., 237:1-7 [1986]; Kramer et al., Cell, 38:879-887 [1984]; Wells et al., Gene, 34:315-323 [1985]; Minshull et al., Curr. Op. Chem. Biol., 3:284-290 [1999]; Christians et al., Nat. Biotechnol., 17:259-264 [1999]; Crameri et al., Nature, 391:288-291 [1998]; Crameri, et al., Nat. Biotechnol., 15:436-438 [1997]; Zhang et al., Proc. Nat. Acad. Sci. U.S.A., 94:4504-4509 [1997]; Crameri et al., Nat. Biotechnol., 14:315-319 [1996]; Stemmer, Nature, 370):389-391 [1994]; Stemmer. Proc. Nat. Acad. Sci. USA, 91:10747-10751 [1994]; WO 95/22625; WO 97/0078; WO 97/35966; WO 98/27230; WO 00/42651; WO 01/75767; and WO 2009/152336, all of which are incorporated herein by reference).

[0167] In some embodiments, the enzyme clones obtained following mutagenesis treatment are screened by subjecting the enzymes to a defined temperature (or other assay conditions, such as testing the enzyme's activity on an indanone substrate) and measuring the amount of enzyme activity remaining after heat treatments or other assay conditions. Clones containing a polynucleotide encoding a P450-BM3 polypeptide are then sequenced to identify the nucleotide sequence changes (if any), and used to express the enzyme in a host cell. Measuring enzyme activity from the expression libraries can be performed using any suitable method known in the art (e.g., standard biochemistry techniques, such as HPLC analysis).

[0168] For engineered polypeptides of known sequence, the polynucleotides encoding the enzyme can be prepared by standard solid-phase methods, according to known synthetic methods. In some embodiments, fragments of up to about 100 bases can be individually synthesized, then joined (e.g., by enzymatic or chemical ligation methods, or polymerase mediated methods) to form any desired continuous sequence. For example, polynucleotides and oligonucleotides disclosed herein can be prepared by chemical synthesis using the classical phosphoramidite method (See e.g., Beaucage et al., Tetra. Lett., 22:1859-69 [1981]; and Matthes et al., EMBO J., 3:801-05 [1984]), as it is typically practiced in automated synthetic methods. According to the phosphoramidite method, oligonucleotides are synthesized (e.g., in an automatic DNA synthesizer), purified, annealed, ligated and cloned in appropriate vectors.

[0169] Accordingly, in some embodiments, a method for preparing the engineered P450-BM3 polypeptide can comprise: (a) synthesizing a polynucleotide encoding a polypeptide comprising greater than 85% identity to an amino acid sequence selected from the amino acid sequence of any variant provided in any of Tables 2.2, 4.1, 5.1, 5.2, 6.1, 7.1, 7.3, 8.1, 9.1, 10.1, 11.2, 12.1, 12.2, 12.3, 13.1, and 14.1, as well as SEQ ID NO: 2, 92, 96, 142, 162, 216, 288, 314, 546, 578, or 680), and (b) expressing the P450-BM3 polypeptide encoded by the polynucleotide. In some embodiments of the method, the amino acid sequence encoded by the polynucleotide can optionally have one or several (e.g., up to 3, 4, 5, or up to 10) amino acid residue deletions, insertions and/or substitutions. In some embodiments, the amino acid sequence has optionally 1-2, 1-3, 1-4, 1-5, 1-6, 1-7, 1-8, 1-9, 1-10, 1-15, 1-20, 1-21, 1-22, 1-23, 1-24, 1-25, 1-30, 1-35, 1-40, 1-45, or 1-50 amino acid residue deletions, insertions and/or substitutions. In some embodiments, the amino acid sequence has optionally 1, 2, 3, 4, 5, 6, 7, 8, 9, 10, 11, 12, 13, 14, 15, 16, 17. 18, 19, 20, 21, 22, 23, 24, 25, 30, 30, 35, 40, 45, or 50 amino acid residue deletions, insertions and/or substitutions. In some embodiments, the amino acid sequence has optionally 1, 2, 3, 4, 5, 6, 7, 8, 9, 10, 11, 12, 13, 14, 15, 16, 18, 20, 21, 22, 23, 24, or 25 amino acid residue deletions, insertions and/or substitutions. In some embodiments, the substitutions can be conservative or non-conservative substitutions.

[0170] The foregoing and other aspects of the invention may be better understood in connection with the following non-limiting examples. The examples are provided for illustrative purposes only and are not intended to limit the scope of the present invention in any way.

### EXPERIMENTAL

[0171] The following Examples, including experiments and results achieved, are provided for illustrative purposes only and are not to be construed as limiting the present invention.

[0172] In the experimental disclosure below, the following abbreviations apply: ppm (parts per million); M (molar); mM (millimolar), uM and μM (micromolar); nM (nanomolar); mol (moles); gm and g (gram); mg (milligrams); ug and μg (micrograms); L and 1 (liter); ml and mL (milliliter); cm (centimeters); mm (millimeters); um and μm (micrometers); sec. (seconds); min(s) (minute(s)); h(s) and hr(s) (hour(s)); U (units); MW (molecular weight); rpm (rotations per minute); ° C.(degrees Centigrade); CDS (coding sequence); DNA (deoxyribonucleic acid); RNA (ribonucleic acid); NA (nucleic acid: polynucleotide); AA (amino acid; polypeptide); E. coli W3110 (commonly used laboratory E. coli strain, available from the Coli Genetic Stock Center [CGSC], New Haven, CT); HPLC (high pressure liquid chromatography); SDS-PAGE (sodium dodecyl sulfate polyacrylamide gel electrophoresis); PES (polyethersulfone); CFSE (carboxyfluorescein succinimidyl ester); IPTG (isopropyl beta-D-1-thiogalactopyranoside); PMBS (polymyxin B sulfate); NADPH (nicotinamide adenine dinucleotide phosphate); GDH (glucose dehydrogenase); TON (turnover number); FIOPC (fold improvement over positive control); TON (turnover number); ESI (electrospray ionization); LB (Luria broth); TB (terrific broth); MeOH (methanol); Athens Research (Athens Research Technology, Athens, GA); ProSpec (ProSpec Tany Technogene, East Brunswick, NJ); Sigma-Aldrich (Sigma-Aldrich, St. Louis, MO); Ram Scientific (Ram Scientific, Inc., Yonkers, NY); Pall Corp. (Pall. Corp., Pt. Washington, NY); Millipore (Millipore, Corp., Billerica MA); Difco (Difco Laboratories, BD Diagnostic Systems, Detroit, MI); Molecular Devices (Molecular Devices, LLC, Sunnyvale, CA); Kuhner (Adolf Kuhner, AG, Basel, Switzerland); Cambridge Isotope Laboratories, (Cambridge Isotope Laboratories, Inc., Tewksbury, MA); Applied Biosystems (Applied Biosystems, part of Life Technologies, Corp., Grand Island, NY), Agilent (Agilent Technologies, Inc., Santa Clara, CA); Thermo Scientific (part of Thermo Fisher Scientific, Waltham, MA); Fisher (Fisher Scientific, Waltham, MA); Corning (Corning, Inc., Palo Alto, CA); Waters (Waters Corp., Milford, MA); GE Healthcare (GE Healthcare Bio-Sciences, Piscataway, NJ); Pierce (Pierce Biotechnology (now part of Thermo Fisher Scientific), Rockford, IL); Phenomenex (Phenomenex, Inc., Torrance, CA); Optimal (Optimal Biotech Group, Belmont, CA); and Bio-Rad (Bio-Rad Laboratories, Hercules, CA).

### Example 1

### Production of Engineered Polypeptides in pCK110900

[0173] The polynucleotide (SEQ ID NO: 1) encoding the polypeptide, with an added six Histidine tag in the C-terminus, from Bacillus megaterium having monooxygenase activity (SEQ ID NO: 2) was cloned into pCK110200, an expression plasmid derived from pCK110900 vector system (See e.g., U.S. Pat. No. 9,714,437, which is hereby incorporated by reference in its entirety). The polynucleotide was subsequently expressed in E. coli W3110fhuA or in E. coli BL21 under the control of the lac promoter.

[0174] For production in BL21 in a 96-well format, single colonies were picked and grown in 190 μL LB containing 1% glucose and 30 μg/mL chloramphenicol (CAM), at 30° C, 200 rpm with 85% relative humidity. Following overnight growth, 20 μL of the grown cultures were transferred into a deep-well plate containing 380 μL of TB, supplemented with iron citrate and trace elements and with 30 μg/mL CAM. The cultures were grown at 26° C., 250) rpm with 85% relative humidity for approximately 2.25 hours. When the optical density (OD₆₀₀) of the cultures reached 0.4-0.6, expression of the gene was induced by addition of IPTG to a final concentration of 1 mM. Following induction, growth was continued for 18-20 hours at 30° C., 250 rpm with 85% relative humidity. Cells were harvested by centrifugation at 4,000 rpm at 4° C. for 10-20 minutes and the media discarded. The cell pellets were stored at −80° C. until ready for use. Prior to performing the assay, cell pellets were resuspended in 200 μL of lysis buffer containing 25 mM Bis-Tris, pH 7.5, with 1 g/L lysozyme, and 0.5 g/L PMBS. In some embodiments, the cell pellets were resuspended in 200 μL of lysis buffer containing 25 mM Bis-Tris, pH 7.5, 0.5 mM CuSO₄, with 1 g/L lysozyme, and 0.5 g/L PMBS. The plates were agitated with medium-speed shaking for 2 hours on a microtiter plate shaker at room temperature. The plates were then centrifuged at 4,000 rpm for 15-20 minutes at 4° C., and the clarified supernatants were used in the HTP assay reaction described below.

[0175] For production in W3110 in a 96-well format, single colonies were picked and grown in 190 μL LB containing 1% glucose and 30 μg/mL chloramphenicol (CAM), at 30° C., 200 rpm, and 85% relative humidity. Following overnight growth, 20 μL of the grown cultures were transferred into a deep-well plate containing 380 μL of TB with 30 μg/mL CAM. The cultures were grown at 36° C., 250 rpm with 85% relative humidity for approximately 2.25 hours. When the optical density (OD₆₀₀) of the cultures reached 0.4-0.6. expression was induced by addition of IPTG to a final concentration of 1 mM. Following induction, growth was continued for 18-20 hours at 30° C., 250 rpm with 85% relative humidity. Cells were harvested by centrifugation at 4,000 rpm at 4° C. for 10-20 minutes and the media discarded. The cell pellets were stored at −80° C. until ready for use.

[0176] Shake-flask procedures can be used to generate engineered polypeptide shake flask powders. which are useful for secondary screening assays and/or use in the biocatalytic processes described herein. Shake flask powder (SFP) preparation of enzymes provides a more purified preparation (e.g., up to 30% of total protein) of the engineered enzyme, as compared to the cell lysate used in HTP assays and also allows for the use of more concentrated enzyme solutions. To start the cultures, a single colony of E. coli, transformed with a plasmid encoding an engineered polypeptide of interest, was inoculated into 6 mL LB with 30 μg/mL CAM and 1% glucose. The culture was grown overnight (at least 16 hours) in an incubator at 30° C. with shaking at 250 rpm. Following the overnight growth, a 5 mL aliquot of the culture was inoculated into 250 mL of TB with 30 μg/mL CAM, in a 1 L shake flask. The 250 mL culture was grown at 30° C. at 250 rpm for 2-3 hours until OD₆₀₀ reached 0.6-0.8. Expression was induced by addition of IPTG to a final concentration of 1 mM. Growth was continued for an additional 18-20 hours at 30° C., and 250 rpm. Cells were harvested by transferring the culture into a pre-weighed centrifuge bottle, then centrifuged at 7,000 rpm for 10 minutes at 4° C. The supernatant was discarded. The remaining cell pellet was weighed. In some embodiments, the cells are stored at −80° C. until ready to use. For lysis, the cell pellet was resuspended in 30 mL of cold 25 mM Bis-Tris, pH 7.5. The resuspended cells were lysed using a 110 L MICROFLUIDIZER® processor system (Microfluidics). Cell debris was removed by centrifugation at 10,000 rpm for 60 minutes at 4° C. The clarified lysate was collected, frozen at −80° C., and then lyophilized, using standard methods known in the art. Lyophilization of frozen clarified lysate provides a dry shake-flask powder comprising crude engineered polypeptide.

### Example 2

### Evolution and Screening of Engineered Polypeptides Derived From SEQ ID NO: 2

[0177] SEQ ID NO: 2 was used to generate the engineered polypeptides of Table 2.1. These polypeptides displayed improved monooxygenase activity towards 4-methoxy-7-methylsulfonyl-indanone (compound (1)), under the desired conditions (e.g., the production of 3-hydroxy-4-methoxy-7-methylsulfonyl-indanone (compound (2))), as compared to the starting polypeptide, as depicted in Scheme 1, above.

[0178] Libraries of engineered polypeptides were generated using various techniques (e.g., saturation mutagenesis, recombination of previously identified beneficial amino acid differences) and screened using the HTP assay below and the analytical method described in Table 2.1.

[0179] The enzyme assay was carried out in a 96-well deep-well (2 mL) plates, in 100 μL total volume/well. Reactions were carried out using 50% (v/v) HTP lysate, 1 g/L 4-methoxy-7-methylsulfonyl-indanone (compound (1)), 1 g/L NADP⁺, 6 g/L Glucose, 0.6 g/L GDH-105, 2.5% (v/v) acetonitrile, 100 mM potassium phosphate, pH 8.0, in a 200 μL total volume. The plates were heat sealed and incubated at 30° C. at 250 rpm for 16 to 20 hours. To quench the reaction, 200 μL of acetonitrile were added into each well. The plates were sealed and shaken on tabletop shakers for 10 minutes. Plates were centrifuged at 4,000 rpm at 4° C. for 10 to 15 minutes. Samples were diluted by mixing 50 μL of the quenched sample with 100 μL of 50:50 water:acetonitrile prior to HPLC analysis.

TABLE 2.1
UPLC Parameters for Examples 2-8

| Instrument | Thermo Ultimate 3000 UPLC | |
|---|---|---|
| Column | ACQUITY UPLC HSS T3 Column, 1.8 μm, | |
| | 2.1 mm × 100 mm | |
| | Gradient (A: 0.1% trifluoroacetic acid in water | |
| | B: 0.1% trifluoroacetic acid in acetonitrile | |
| Mobile Phase | Time(min) | % B |
| | 0.00 | 25 |
| | 0.4 | 25 |
| | 2.0 | 98 |
| | 2.1 | 25 |
| | 2.5 | 25 |

| | |
|---|---|
| Flow Rate | 0.6 mL/min |
| Run time | 2.5 min |
| Detector | 256 nm |
| Peak Retention | 4-methoxy-7-methylsulfonyl-indanone substrate |
| Times | @ 1.52 minutes 3-hydroxy-4-methoxy-7- |
| | methylsulfonyl-indanone product @ 0.67 minutes |
| Column Temperature | 40° C. |
| Sample Temperature | 25° C. |
| Injection Volume | 10 μL |

TABLE 2.2
Activity of Variants Relative to SEQ ID NO: 2

| | Amino Acid Differences | Activity FIOP |
|---|---|---|
| SEQ ID NO: | (Relative to | (Relative to |
| (nt/aa) | SEQ ID NO: 2) | SEQ ID NO: 2) |
| 3/4 | L105G/S256R/D550R | +++ |
| 5/6 | S256R | +++ |
| 7/8 | T437K | +++ |
| 9/10 | M186G | +++ |
| 11/12 | S256R/E748L/E853P | +++ |
| 13/14 | P330G | +++ |
| 15/16 | L105G/S256R/D433K/D550R | +++ |
| 17/18 | L182A | +++ |
| 19/20 | A75G | ++ |
| 21/22 | T349A/N574T/D600R/S623T/ | ++ |
| | 1825L/E853P/V915I | |
| 23/24 | S256R/D433V/N574T/D600R | ++ |
| 25/26 | T437M | ++ |
| 27/28 | S256R/D433K/D550R/N574T/ | ++ |
| | E853P | |
| 29/30 | A75G/S607G | ++ |
| 31/32 | L151T | ++ |
| 33/34 | F159M | ++ |
| 35/36 | S333P | ++ |
| 37/38 | T147R | ++ |
| 39/40 | S256R/D433V/N574T/A584R/ | ++ |
| | F663L/E748L/1825L | |
| 41/42 | L105G/S256R/D433V/K453G/ | ++ |
| | E853P | |
| 43/44 | A584R | ++ |
| 45/46 | S256R/D433V/K453G/D550R/ | ++ |
| | F663L/L685I | |
| 47/48 | N254L | + |
| 49/50 | T437G | + |
| 51/52 | D433K/K561N/N574T/D600R/ | + |
| | F663L | |
| 53/54 | G86S | + |
| 55/56 | I434V | + |
| 57/58 | V179L | + |
| 59/60 | N574T/D600R/E748L | + |
| 61/62 | L105G/K453G/N574T | + |
| 63/64 | L729C | + |
| 65/66 | A75S | + |
| 67/68 | E748L | + |
| 69/70 | I154M | + |
| 71/72 | L182V/K573R | + |
| 73/74 | T147G | + |
| 75/76 | K453G/L729C | + |
| 77/78 | F78V | + |
| 79/80 | K561N/N574T/F663L/V915I | + |
| 81/82 | D433K/D550R | + |
| 83/84 | T437R | + |
| 85/86 | F159I | + |
| 87/88 | L105G/S256R/D433K/D550R/ | + |
| | D600R/R683Q/V760A/1825L | |
| 89/90 | S256R/F663L/V915I | + |

¹ Levels of increased activity were determined relative to the reference polypeptide of SEQ ID NO: 2 and defined as follows: “+” 1.50 to 1.70-fold increased activity; “++” > 1.70-fold increased activity; “+++” > 2.20-fold increased activity.

### Example 3

### Evolution and Screening of Engineered Polypeptides Derived From SEQ ID NO:42

[0180] SEQ ID NO: 42 was codon-optimized and re-cloned into pCK110900. The polynucleotide was subsequently expressed in E. coli W3110fhuA under the control of the lac promoter, resulting in SEQ ID NO: 92. A single clone with high expression (SEQ ID NO: 92) was chosen as the backbone for subsequent rounds of evolution.

### Example 4

### Evolution and Screening of Engineered Polypeptides Derived From SEQ ID NO: 92

[0181] SEQ ID NO: 92 was used to generate the engineered polypeptides of Table 4.1. These polypeptides displayed improved monooxygenase activity (Scheme 1) towards 4-methoxy-7-methylsulfonyl-indanone (compound (1)), under the desired conditions (e.g., the production of 3-hydroxy-4-methoxy-7-methylsulfonyl-indanone (compound (2))), as compared to the starting polypeptide.

[0182] Libraries of engineered polypeptides were generated using various techniques (e.g., saturation mutagenesis, recombination of previously identified beneficial amino acid differences) and screened using HTP assay below and the analytical method described in Table 2.1.

[0183] The enzyme assay was carried out in a 96-well deep-well (2 mL) plates, in 100 μL total volume/well.

[0184] Reactions were carried out using 25% (v/v) HTP lysate, 1 g/L 4-methoxy-7-methylsulfonyl-indanone (compound (1)), 1 g/L NADP⁺, 6 g/L Glucose, 0.6 g/L GDH-105, 5% (v/v) acetonitrile, 100 mM potassium phosphate, pH 8.0, in a 100 μL total volume. The plates were heat sealed and incubated at 30° C., and 250 rpm for 16 to 20 hours. To quench the reaction, 200 μL of acetonitrile were added into each well. The plates were sealed and shaken on tabletop shakers for 10 minutes. Plates were centrifuged at 4,000 rpm at 4° C. for 10 to 15 minutes. Samples were diluted by mixing 50 μL of the quenched sample with 100 μL of 50:50 water:acetonitrile prior to HPLC analysis, using the method shown on Table 2.1.

TABLE 4.1
Activity of Variants Relative to SEQ ID NO: 92

| | Amino Acid Differences | Activity FIOP |
|---|---|---|
| SEQ ID NO: | (Relative to | (Relative to |
| (nt/aa) | SEQ ID NO: 92) | SEQ ID NO: 92) |
| 93/94 | A331L | +++ |
| 95/96 | A75G/T437K | +++ |
| 97/98 | A331V | +++ |
| 99/100 | A75G | +++ |
| 101/102 | T437K | ++ |
| 103/104 | T147R/1154M | ++ |
| 105/106 | T147R | ++ |
| 107/108 | M186G | ++ |
| 109/110 | I259L/T437K | ++ |
| 111/112 | T147R/N254L/A331V | ++ |
| 113/114 | L151V | ++ |
| 115/116 | V217L/T437K | ++ |
| 117/118 | I154M/V185L | + |
| 119/120 | T147R/A331L | + |
| 121/122 | A75G/Q404K/T437K | + |
| 123/124 | M186G/Q404K | + |
| 125/126 | Q404K | + |
| 127/128 | A75G/Q404K | + |
| 129/130 | V185L/Q237R/A331L/1434V | + |
| 131/132 | V179L | + |
| 133/134 | V179L/M186G/T437K | + |
| 135/136 | V179L/Q404K | + |
| 137/138 | V179L/M186G | + |

¹ Levels of increased activity were determined relative to the reference polypeptide of SEQ ID NO: 92 and defined as follows: “+” 1.30 to 1.39-fold increased activity; “++” > 1.39-fold increased activity; “+++” > 1.50-fold increased activity.

### Example 5

### Evolution and Screening of Engineered Polypeptides Derived From SEQ ID NO: 96

[0185] SEQ ID NO: 96 was used to generate the engineered polypeptides of Table 5.1. These polypeptides displayed improved monooxygenase activity (Scheme 1) towards 4-methoxy-7-methylsulfonyl-indanone (compound (1)), under the desired conditions (e.g., the production of 3-hydroxy-4-methoxy-7-methylsulfonyl-indanone (compound (2))), as compared to the starting polypeptide (Scheme 1).

[0186] Libraries of engineered polypeptides were generated using various techniques (e.g., saturation mutagenesis, recombination of previously identified beneficial amino acid differences) and screened using HTP assay and analysis methods, as indicated.

[0187] The cell pellets were lysed with 400 μL of 100 mM potassium phosphate, pH 8, with 1 g/L lysozyme, and 1 mM MgSO4. Reactions were carried out in a 96-well deep-well (2 mL) plates, in 100 μL total volume/well. Reactions were carried out using 3.5% (v/v) HTP lysate, 1 g/L 4-methoxy-7-methylsulfonyl-indanone (compound (1)), 1 g/L NADP⁺, 6 g/L Glucose, 0.6 g/L GDH-105, 100 mM potassium phosphate, pH 8.0, 5% (v/v) DMSO. The plates were heat sealed, incubated at 30° C. and 250 rpm for 16 to 20 hours. The reactions were quenched by the addition of 200 μL of acetonitrile into each well. The plates were sealed and shaken on tabletop shakers for 10 minutes. Plates were centrifuged at 4,000 rpm at 4° C. for 10 to 15 minutes. Samples were diluted by mixing 50 μL of the quenched sample with 100 μL of 50:50 water:acetonitrile prior to HPLC analysis, as described in Table 2.1.

TABLE 5.1
Activity of Variants Relative to SEQ ID NO: 96

| | Amino Acid Differences | Activity FIOP in 5% DMSO |
|---|---|---|
| SEQ ID NO: | (Relative to | (Relative to |
| (nt/aa) | SEQ ID NO: 96) | SEQ ID NO: 96) |
| 139/140 | G75A | +++ |
| 141/142 | M178V/R618S | +++ |
| 143/144 | M213L | ++ |
| 145/146 | I259V | ++ |
| 147/148 | D209A | + |

¹ Levels of increased activity were determined relative to the reference polypeptide of SEQ ID NO: 96 and defined as follows: “+” 2.70 to 2.90-fold increased activity; “++” > 2.9-fold increased activity; “+++” > 3.00-fold increased activity.

[0188] The variants were also evaluated for activity in the presence of 5% acetonitrile. The cell pellets were lysed with 400 μL of 100 mM potassium phosphate, pH 8, with 1 g/L lysozyme, and 1 mM MgSO4. Reactions were carried out in a 96-well deep-well (2 mL) plates, in 100 μL total volume/well. Reactions were carried out using 3.5% (v/v) HTP lysate, 1 g/L 4-methoxy-7-methylsulfonyl-indanone (compound (1)), 1 g/L NADP⁺, 6 g/L Glucose, 0.6 g/L GDH-105, 100 mM potassium phosphate, pH 8.0, 5% (v/v) acetonitrile. The plates were heat sealed and incubated at 30° C. and 250 rpm for 16 to 20 hours. The reactions were quenched by the addition of 200 μL of acetonitrile into each well. The plates were sealed and shaken on tabletop shakers for 10 minutes. Plates were centrifuged at 4,000 rpm at 4° C. for 10 to 15 minutes. Samples were diluted by mixing 50 μL of the quenched sample with 100 μL of 50:50 water:acetonitrile prior to HPLC analysis, as described in Table 2.1.

TABLE 5.2
Activity of Variants Relative to SEQ ID NO: 96

| | Amino Acid Differences | Activity FIOP in 5% acetonitrile |
|---|---|---|
| SEQ ID NO: | (Relative to | (Relative to |
| (nt/aa) | SEQ ID NO: 96) | SEQ ID NO: 96) |
| 149/150 | M178V | +++ |
| 143/144 | M213L | ++ |
| 141/142 | M178V/R618S | ++ |
| 147/148 | D209A | + |

¹ Levels of increased activity were determined relative to the reference polypeptide of SEQ ID NO: 96 and defined as follows: “+” 2.80-3.00-fold increased activity; “++” > 3.00-fold increased activity; “+++” > 5.00-fold increased activity.

### Example 6

### Evolution and Screening of Engineered Polypeptides Derived From SEQ ID NO: 142

[0189] SEQ ID NO: 142 was used to generate the engineered polypeptides of Table 6.1. These polypeptides displayed improved monooxygenase activity (Scheme 1) towards 4-methoxy-7-methylsulfonyl-indanone (compound (1)), under the desired conditions (e.g., the production of 3-hydroxy-4-methoxy-7-methylsulfonyl-indanone (compound (2))), as compared to the starting polypeptide.

[0190] Libraries of engineered polypeptides were generated using various techniques (e.g., saturation mutagenesis, recombination of previously identified beneficial amino acid differences) and screened using HTP assay and analysis methods, as indicated.

[0191] The cell pellets were lysed with 400 μL of 100 mM potassium phosphate, pH 8, with 1 g/L lysozyme, and 1 mM MgSO4. After lysis and lysate clarification, reactions were carried out in a 96-well deep-well (2 mL) plates, in 100 μL total volume/well. Reactions were carried out using 7.5% (v/v) HTP lysate, 1 g/L 4-methoxy-7-methylsulfonyl-indanone (compound (1)), 1 g/L NADP⁺, 6 g/L Glucose, 0.6 g/L GDH-105, 100 mM potassium phosphate, pH 8.0, 15% (v/v) DMSO. The plates were heat sealed and incubated at 30° C. at 250 rpm for 16 to 20 hours. The reactions were quenched by the addition of 200 μL of acetonitrile into each well. The plates were sealed and shaken on tabletop shakers for 10 minutes. Plates were centrifuged at 4,000 rpm at 4° C. for 10 to 15 minutes. Samples were diluted by mixing 50 μL of the quenched sample with 100 μL of 50:50 water:acetonitrile prior to HPLC analysis, described in Table 2.1.

TABLE 6.1
Activity of Variants Relative to SEQ ID NO: 142

| | | Activity FIOP |
|---|---|---|
| SEQ ID NO: | Amino Acid Differences | (Relative to |
| (nt/aa) | (Relative to SEQ ID NO: 142) | SEQ ID NO: 142) |
| 151/152 | E930R | +++ |
| 153/154 | T349I/S618R | +++ |
| 155/156 | S333G/K435G | +++ |
| 157/158 | P885S | +++ |
| 159/160 | I454M | +++ |
| 161/162 | P885D | ++ |
| 163/164 | A29T/M213L/S333G/K435G | ++ |
| 165/166 | D553G | ++ |
| 167/168 | P885R | ++ |
| 169/170 | D209A/M213L/M355T/K435S/K437M | + |
| 171/172 | D209A/I210A/I259V/K435G | + |
| 173/174 | E888G | + |
| 175/176 | A29T/D209A/I210A/K435G/K437M | + |
| 177/178 | S618R/E748Q | + |
| 179/180 | G458L | + |
| 181/182 | P655K | + |
| 183/184 | G994N | + |
| 185/186 | G458P/S618R | + |
| 187/188 | A511S/E792G | + |

¹ Levels of increased activity were determined relative to the reference polypeptide of SEQ ID NO: 142 and defined as follows: “+” 1.40 to 1.60-fold increased activity; “++” > 1.60-fold increased activity; “+++” > 1.80-fold increased activity.

### Example 7

### Evolution and Screening of Engineered Polypeptides Derived Fom SEQ ID NO: 162

[0192] SEQ ID NO: 162 was used to generate the engineered polypeptides of Tables 7.1 and 7.3. These polypeptides displayed improved monooxygenase activity (Scheme 1) towards 4-methoxy-7-methylsulfonyl-indanone (compound (1)), under the desired conditions (e.g., the production of 3-hydroxy-4-methoxy-7-methylsulfonyl-indanone (compound (2))), as compared to the starting polypeptide.

[0193] Libraries of engineered polypeptides were generated using various techniques (e.g., saturation mutagenesis, recombination of previously identified beneficial amino acid differences) and screened using HTP assay and analysis methods, as indicated.

[0194] The cell pellets were lysed with 400 μL of 100 mM potassium phosphate, pH 8, with 1 g/L lysozyme, and 1 mM MgSO4. After lysis and lysate clarification, reactions were carried out in a 96-well deep-well (2 mL) plates, in 100 μL total volume/well. Reactions were carried out using 5% (v/v) HTP lysate, 1 g/L 4-methoxy-7-methylsulfonyl-indanone (compound (1)), 1 g/L NADP⁺, 6 g/L Glucose, 0.6 g/L GDH-105, 100 mM potassium phosphate, pH 8.0, 15% (v/v) DMSO. The plates were heat sealed and incubated at 30° C., and 250 rpm for 16 to 20 hours. The reactions were quenched by the addition of 200 μL of acetonitrile into each well. The plates were sealed and shaken on tabletop shakers for 10 minutes. Plates were centrifuged at 4,000 rpm at 4° C. for 10 to 15 minutes. Samples were diluted by mixing 50 μL of the quenched sample with 100 μL of 50:50 water:acetonitrile prior to HPLC analysis, described in Table 2.1.

TABLE 7.1
Activity of Variants Relative to SEQ ID NO: 162

| | | Activity FIOP |
|---|---|---|
| SEQ ID NO: | Amino Acid Differences | (Relative to |
| (nt/aa) | (Relative to SEQ ID NO: 162) | SEQ ID NO: 162) |
| 189/190 | S66R/K435G/G458L/T613A/A770S/ | +++ |
| | D885P/E888G/E930R | |
| 191/192 | D209A/K435G/I454M/G458L/T613A/ | +++ |
| | A770S/D885P | |
| 193/194 | D209A/K435G/T613A | +++ |
| 195/196 | S66R/D209A/T349I/G458L | ++ |
| 197/198 | D209A/M355I/I454M/G458L/A770S | ++ |
| 199/200 | S66R/M355I/I454M/G458L/D553G/ | ++ |
| | E888G/E930R | |
| 201/202 | D209A/T349I/M355I/K435G/A770S/ | ++ |
| | E888G | |
| 203/204 | S66R/M355I/K435G/I454M/G458L/ | + |
| | D553G/T613A/A770S/E888G | |
| 205/206 | D209A/G458L/D553G/T613A | + |
| 207/208 | S66R/D209A/T349I | + |
| 209/210 | S66R/G458L/D553G/E930R | + |

¹ Levels of increased activity were determined relative to the reference polypeptide of SEQ ID NO: 162 and defined as follows: “+” 1.40 to 1.49-fold increased activity; “++” > 1.50-fold increased activity; “+++” > 1.70-fold increased activity.

[0195] The variants were also evaluated using the bi-aryl substrate (Scheme 2).

[0196] Reactions were carried out using 60% (v/v) HTP lysate, 1 g/L 4-O-aryl-7-methylsulfonyl-indanone (compound (3)), 1 g/L NADP⁺, 6 g/L Glucose, 0.6 g/L GDH-105, 100 mM potassium phosphate, pH 8.0, 15% (v/v) DMSO, in 100 ML volume. The plates were heat sealed and incubated at 30° C. and 250 rpm for 16 to 20 hours. The reactions were quenched by the addition of 300 μL of acetonitrile into each well. The plates were sealed and shaken on tabletop shakers for 10 minutes. Plates were centrifuged at 4,000 rpm and at 4° C. for 10 to 15 minutes. Samples were analyzed using LC-MS described in Table 7.2.

TABLE 7.2
LC/MS Method

| Instrument | 3200 QTRAP//Waters Acquity system | | | | | |
|---|---|---|---|---|---|---|
| Column | Agilent Eclipse C18 (50 × 4.6, 1.8u) with guard | | | | | |
| | Gradient (A: 0.1% formic acid in water B: acetonitrile) | | | | | |
| | Time(min) | % B | | | | |
| Mobile | 0.00 | 2 | | | | |
| Phase | 0.5 | 25 | | | | |
| | 4.0 | 98 | | | | |
| | 4.1 | 2 | | | | |
| | 5.0 | 2 | | | | |
| Flow Rate | 0.6 mL/min | | | | | |
| Run time | 5.0 min | | | | | |
| Detector | 258 nm | | | | | |
| Column | 50° C. | | | | | |
| Temperature | | | | | | |
| Sample | 25° C. | | | | | |
| Temperature | | | | | | |
| Injection | 10 μL | | | | | |
| Volume | | | | | | |
| MS | Polarity: positive mode | | | | | |
| parameters | IS: 5500 Transitions | | | | | |
| | TEM: 550 | Q1 | Q3 | Time (msec) | CE | ID |
| | GS1/GS2: | 346.2 | 298.0 | 150.0 | 30 | Substrate |
| | 50/30 | | | | | |
| | DP: 80 | 346.2 | 224.2 | 150.0 | 30 | Substrate |
| | EP: 10 | 362.1 | 237.1 | 150.0 | 30 | Product |
| | CXP: 3.0 | 362.1 | 265.3 | 150.0 | 30 | Product |

TABLE 7.3
Activity of Variants Relative to SEQ ID NO: 162

| | | Activity FIOP |
|---|---|---|
| SEQ ID NO: | Amino Acid Differences | (Relative to |
| (nt/aa) | (Relative to SEQ ID NO: 162) | SEQ ID NO: 162) |
| 211/212 | A79G/L182G | +++ |
| 213/214 | D209A | +++ |
| 215/216 | A79G/A329G | +++ |
| 217/218 | I210S/M213L | +++ |
| 219/220 | D209N/I210A/T261S | +++ |
| 221/222 | A329G | +++ |
| 223/224 | L76V/L83A/A329G | +++ |
| 225/226 | V178A/D209A/I210S/M213I | ++ |
| 227/228 | A329G/T439A | ++ |
| 229/230 | V178A/D209A/M213L/I260A/ | ++ |
| | T261S | |
| 231/232 | F82V/L83S | ++ |
| 233/234 | D209N/I260A | ++ |
| 235/236 | V178G/D209N/I260A | ++ |
| 237/238 | I210V/M213L | ++ |
| 239/240 | F88V | ++ |
| 241/242 | L53V/S55G/I59V/A79V/D81A/ | ++ |
| | G253E | |
| 243/244 | L182V/A329V | ++ |
| 245/246 | D81A | ++ |
| 247/248 | A79V/V185A/Y216L | + |
| 249/250 | S55G/159V/C206F | + |
| 251/252 | F82V/G86A/V178A/D209N/I210A/ | + |
| | M213I/T261S | |
| 253/254 | V185A/C206F/Y216L/G253E | + |
| 255/256 | L53V/S55G/D81A/C206F/G253E | + |
| 257/258 | A79G/I264V/E268D/A329V | + |
| 259/260 | S55G/I59V | + |
| 261/262 | E39P/L53V/S55G/D81A/Y216L/ | + |
| | G253E | |
| 263/264 | L83A/V178A/I210V | + |
| 265/266 | I210A/M213L | + |
| 267/268 | F82A/G86A/F88P/D209N/M213A | + |
| 269/270 | A79V/G253E | + |
| 271/272 | L53V/159V | + |
| 273/274 | S55G/I59V/V125A/C206F | + |
| 275/276 | G86A/V178G/D209N/I210V | + |
| 277/278 | L76A/A79G/L83S/L182G/E268N/ | + |
| | A329V | |
| 279/280 | I260A/T261S | + |
| 281/282 | I59V/D81A/Y216L/G253E | + |
| 283/284 | L83G/G86V/F88G/I210A/M213I | + |

¹ Levels of increased activity were determined relative to the reference polypeptide of SEQ ID NO: 162 and defined as follows: “+” 1.40 to 1.70-fold increased activity; “++” > 1.70-fold increased activity; “+++” > 3.50-fold increased activity.

### Example 8

### Evolution and Screening of Engineered Polypeptides Derived From SEQ ID NO: 216

[0197] SEQ ID NO: 216 was used to generate the engineered polypeptides of Table 8.1. These polypeptides displayed improved monooxygenase activity (Scheme 2) towards 4-O-aryl-7-methylsulfonyl-indanone (compound (3)), under the desired conditions (e.g., the production of 3-hydroxy-4-O-aryl-7-methylsulfonyl-indanone (compound (4))), as compared to the starting polypeptide.

[0198] Libraries of engineered polypeptides were generated using various techniques (e.g., saturation mutagenesis, recombination of previously identified beneficial amino acid differences) and screened using HTP assay and analysis methods, as indicated.

[0199] The cell pellets were lysed with 300 μL of 100 mM potassium phosphate, pH 8, with 1 g/L lysozyme, and 1 mM MgSO4. After lysis and lysate clarification, reactions were carried out in a 96-well deep-well (2 mL) plates, in 100 μL total volume/well. The 4-O-aryl-7-methylsulfonyl-indanone substrate (compound (3)) was dissolved in DMSO. Reactions were carried out using 60% (v/v) HTP lysate, 1 g/L 4-O-aryl-7-methylsulfonyl-indanone (compound (3)), 1 g/L NADP⁺, 6 g/L Glucose, 0.6 g/L GDH-105. 100 mM potassium phosphate, pH 8.0, with 15% (v/v) final DMSO concentration. The plates were heat sealed and incubated at 30° C., and 250 rpm for 16 to 20 hours. The reactions were quenched by the addition of 300 μL of acetonitrile into each well. The plates were sealed and shaken on tabletop shakers for 10 minutes. Plates were centrifuged at 4,000 rpm at 4° C. for 10 to 15 minutes. Samples were analyzed using LC-MS, described in Table 7.2.

TABLE 8.1
Activity of Variants Relative to SEQ ID NO: 216

| | | Activity FIOP |
|---|---|---|
| SEQ ID NO: | Amino Acid Differences | (Relative to |
| (nt/aa) | (Relative to SEQ ID NO: 216) | SEQ ID NO: 216) |
| 285/286 | G75A | +++ |
| 287/288 | G75S | +++ |
| 289/290 | V185L | +++ |
| 291/292 | A181L | ++ |
| 293/294 | S177A | ++ |
| 295/296 | G75V | ++ |
| 297/298 | G75E | ++ |
| 299/300 | V178A | ++ |
| 301/302 | K437R | ++ |
| 303/304 | D81E | + |
| 305/306 | V185I | + |
| 307/308 | G75C | + |
| 309/310 | A181R | + |
| 311/312 | V178G | + |

¹ Levels of increased activity were determined relative to the reference polypeptide of SEQ ID NO: 216 and defined as follows: “+” 1.30 to 1.40-fold increased activity; “++” > 1.40-fold increased activity; “+++” > 1.90-fold increased activity.

### Example 9

### Evolution and Screening of Engineered Polypeptides Derived From SEQ ID NO: 288

[0200] SEQ ID NO: 288 was used to generate the engineered polypeptides of Table 9.1. These polypeptides displayed improved monooxygenase activity (Scheme 2) towards 4-O-aryl-7-methylsulfonyl-indanone (compound (3)). under the desired conditions (e.g., the production of 3-hydroxy-4-O-aryl-7-methylsulfonyl-indanone (compound (4))), as compared to the starting polypeptide.

[0201] Libraries of engineered polypeptides were generated using various techniques (e.g., saturation mutagenesis, recombination of previously identified beneficial amino acid differences) and screened using HTP assay and analysis methods, as indicated.

[0202] The cell pellets were lysed with 300 μL of 100 mM potassium phosphate, pH 8, with 1 g/L lysozyme, and 1 mM MgSO4. After lysis and lysate clarification, reactions were carried out in a 96-well deep-well (2 mL) plates, in 100 μL total volume/well. The 4-O-aryl-7-methylsulfonyl-indanone substrate (compound (3)) was dissolved in DMSO. Reactions were carried out using 60% (v/v) HTP lysate, 1 g/L 4-O-aryl-7-methylsulfonyl-indanone (compound (3)), 1 g/L NADP⁺, 6 g/L Glucose, 0.6 g/L GDH-105. 100 mM potassium phosphate, pH 8.0, with 15% (v/v) final DMSO concentration. The plates were heat sealed and incubated at 30° C., and 250 rpm for 16 to 20 hours. The reactions were quenched by the addition of 300 μL of acetonitrile into each well. The plates were sealed and shaken on tabletop shakers for 10 minutes. Plates were centrifuged at 4,000 rpm at 4° C. for 10 to 15 minutes. Samples were analyzed using LC-MS, described in Table 7.2.

TABLE 9.1
Activity of Variants Relative to SEQ ID NO: 288

| | | Activity FIOP |
|---|---|---|
| SEQ ID NO: | Amino Acid Differences | (Relative to |
| (nt/aa) | (Relative to SEQ ID NO: 288) | SEQ ID NO: 288) |
| 313/314 | G79A/K437R/G458L | +++ |
| 315/316 | G79A/T613A | +++ |
| 317/318 | S66R/G79A/S177A/C206F/K435G/G458L/T613A | +++ |
| 319/320 | S66R/G79A/K437R/G458L | +++ |
| 321/322 | G79A/S177A/K435G/K437R/G458L | +++ |
| 323/324 | S66R/A181L/V185L/K437R | +++ |
| 325/326 | G79A/K435G/K437R/T613A | +++ |
| 327/328 | S66R/G79A/C206F/K435G/T613A | +++ |
| 329/330 | G79A/S177A/C206F/K437R/G458L/T613A | +++ |
| 331/332 | G79A/K437R | +++ |
| 333/334 | G79A/C206F | +++ |
| 335/336 | A181L/V185I/K437R/G458L | +++ |
| 337/338 | G79A/G458L | +++ |
| 339/340 | G79A/A181L/V185I/K437R | +++ |
| 341/342 | S66R/G79A/G458L/T613A | +++ |
| 343/344 | G79A/K435G/K437R/G458L | +++ |
| 345/346 | S66R/G79A/A181L/V185L/I210A/K437R/G458L/T613A | ++ |
| 347/348 | S66R/K437R/G458L | ++ |
| 349/350 | S66R/G79A/D81A/C206F/K435G/K437R/T613A | ++ |
| 351/352 | V185I/E208V/K437R/G458L | ++ |
| 353/354 | G79A/C206F/K435G/T613A | ++ |
| 355/356 | K435G/K437R/G458L/T613A | ++ |
| 357/358 | S66R/G79A/D81A/K435G/K437R/G458L | ++ |
| 359/360 | S66R/G79A/V185L/1210A/K437R/G458L/T613A | ++ |
| 361/362 | S66R/C206F/K437R/G458L | ++ |
| 363/364 | V185I/K435G/K437R | ++ |
| 365/366 | A181L/V185L/K437R | ++ |
| 367/368 | G79A/C206F/G458L | ++ |
| 369/370 | S66R/G79A | ++ |
| 371/372 | G79A/C206F/G458L/T613A | ++ |
| 373/374 | G79A/I210A/K437R/G458L/T613A | ++ |
| 375/376 | G79A/D81A/S177A/C206F/K437R/G458L/T613A | ++ |
| 377/378 | G79A/K435G/T613A | ++ |
| 379/380 | S66R/G79A/A181L | ++ |
| 381/382 | S66R/G79A/C206F/K435G/K437R | ++ |
| 383/384 | S66R/G79A/D81A/V185I/K435G/K437R/G458L | ++ |
| 385/386 | S66R/G79A/C206F | ++ |
| 387/388 | S66R/G79A/K435G/K437R | ++ |
| 389/390 | S177A/K435G/K437R/T613A | ++ |
| 391/392 | G79A/D81A/A181L/K437R/G458L/T613A | ++ |
| 393/394 | S66R/G79A/K435G/G458L | ++ |
| 395/396 | K437R/T613A | ++ |
| 397/398 | S177A/C206F/K435G/K437R/G458L | ++ |
| 399/400 | G79A/D81A/K437R/T613A | ++ |
| 401/402 | K435G/K437R/G458L | ++ |
| 403/404 | G79A/C206F/K435G/K437R | ++ |
| 405/406 | C206F/K437R | ++ |
| 407/408 | S66R/C206F/K435G/K437R | ++ |
| 409/410 | K437R | ++ |
| 411/412 | G79A/G458L/T613A | ++ |
| 413/414 | A181L/V185L/K435G/K437R | ++ |
| 415/416 | G79A/A181L/V185L/D209A/I210A/K437R/G458L/T613A | ++ |
| 417/418 | K435G/K437R/T613A | + |
| 419/420 | S66R/G79A/D81A/K437R/T613A | + |
| 421/422 | G79A/A181L/V185L/1210A/K435G/K437R/G458L | + |
| 423/424 | G79A/K435G | + |
| 425/426 | A181L/V185L/K435G/K437R/T613A | + |
| 427/428 | K437R/G458L/T613A | + |
| 429/430 | G79A/A181L/V185L/1210A/K435G/K437R | + |
| 431/432 | S66R/K435G/K437R/T613A | + |
| 433/434 | K435G/K437R | + |
| 435/436 | S66R/G79A/D81A/C206F/K437R/G458L | + |
| 437/438 | K437R/G458L | + |
| 439/440 | G79A/D81A/C206F/K435G/K437R | + |
| 441/442 | G79A/A181L/1210A/G458L | + |
| 443/444 | S66R/G79A/D81A/A181L/1210A/K435G/K437R | + |
| 445/446 | S66R/K435G/K437R/G458L | + |
| 447/448 | V178A/K437R/G458L | + |
| 449/450 | P95L/S177A/K437R | + |
| 451/452 | G79A/A181L/D209A/G458L/T613A | + |
| 453/454 | S177A/K437R | + |
| 455/456 | G79A/M213I/K437R/G458L | + |
| 457/458 | G79A/V185L/G458L | + |
| 459/460 | D81A/A181L/V185I/D209A/I210A/K437R/G458L/T613A | + |
| 461/462 | S66R/G79A/D81A | + |
| 463/464 | S66R/G79A/K435G | + |
| 465/466 | S66R/A181L/V185L/G458L | + |
| 467/468 | S66R/K435G/K437R | + |
| 469/470 | G79A/D81A/T613A | + |
| 471/472 | G79A/D81A/K435G/G458L/T613A | + |
| 473/474 | G79A/A181L/D209A/K437R/T613A | + |
| 475/476 | G79A/D81A/C206F/T613A | + |
| 477/478 | C206F/K437R/G458L/T613A | + |
| 479/480 | S66R/V178A/K435G/K437R/G458L | + |
| 481/482 | K437R/M621I | + |
| 483/484 | C206F/K435G/K437R | + |
| 485/486 | G79A | + |
| 487/488 | G79A/C206F/M213A/K437R/T613A | + |
| 489/490 | S66R/G79A/D209A/I210A/K437R/T613A | + |
| 491/492 | S66R/G458L | + |

¹ Levels of increased activity were determined relative to the reference polypeptide of SEQ ID NO: 288 and defined as follows: “+” 1.50 to 2.00-fold increased activity; “++” > 2.00-fold increased activity; “+++” > 3.00-fold increased activity.

### Example 10

### Evolution and Screening of Engineered Polypeptides Derived From SEQ ID NO: 314

[0203] SEQ ID NO: 314 was used to generate the engineered polypeptides of Table 10.1. These polypeptides displayed improved monooxygenase activity (Scheme 2) towards 4-O-aryl-7-methylsulfonyl-indanone (compound (3)), under the desired conditions (e.g., the production of 3-hydroxy-4-O-aryl-7-methylsulfonyl-indanone(compound (4))), as compared to the starting polypeptide.

[0204] Libraries of engineered polypeptides were generated using various techniques (e.g., saturation mutagenesis, recombination of previously identified beneficial amino acid differences) and screened using HTP assay and analysis methods, as indicated.

[0205] The cell pellets were lysed with 300 μL of 100 mM potassium phosphate, pH 8, with 1 g/L lysozyme, and 1 mM MgSO4. After lysis and lysate clarification, reactions were carried out in a 96-well deep-well (2 mL) plates, in 100 μL total volume/well. The 4-O-aryl-7-methylsulfonyl-indanone substrate (compound (3)) was dissolved in DMSO. Reactions were carried out using 60% (v/v) HTP lysate, 1 g/L 4-O-aryl-7-methylsulfonyl-indanone (compound (3)), 1 g/L NADP⁺, 6 g/L Glucose, 0.6 g/L GDH-105, 100 mM potassium phosphate, pH 8.0, with 15% (v/v) final DMSO concentration. The plates were heat scaled and incubated at 30° C., and 250 rpm for 16 to 20 hours. The reactions were quenched by the addition of 300 μL of acetonitrile into each well. The plates were sealed and shaken on tabletop shakers for 10 minutes. Plates were centrifuged at 4,000 rpm at 4° C. for 10 to 15 minutes. Samples were analyzed using LC-MS, described in Table 7.2.

TABLE 10.1
Activity of Variants Relative to SEQ ID NO: 314

| | | Activity FIOP |
|---|---|---|
| SEQ ID NO: | Amino Acid Differences | (Relative to |
| (nt/aa) | (Relative to SEQ ID NO: 314) | SEQ ID NO: 314) |
| 493/494 | S66R/R111H/K114R/A181L/V185I/E374S/E603F/A604G/ | +++ |
| | T897V | |
| 495/496 | S66R/R111L/K114R/E374S/A604G/T613A/E896L/T897V/ | +++ |
| | I999C | |
| 497/498 | S66R/R111H/K114G/S177A/A181L/V185I/E374S/E603F/ | +++ |
| | T613A/Q726L/P853D/E896L/T897V/I999C | |
| 499/500 | S66R/R111L/K114R/S177A/A181L/E374S/E603F/S644T/ | ++ |
| | P853D/E896L/I999C | |
| 501/502 | S66R/R111H/K114G/A181L/E603F/T613A/Q726L/P853D/ | ++ |
| | T897V/I999C | |
| 503/504 | S66R/R111L/K114R/A181L/V185I/E374S | ++ |
| 505/506 | S66R/R111L/K114R/S177A/A181L/R601M/E603F/A604G/ | ++ |
| | T613A/Q726L/E1026Y | |
| 507/508 | S66R/V185I/R601M/A604G/T613A/Q726L/P853D/E1026Y | ++ |
| 509/510 | S66R/R111H/K114G/A181L/V185I/R601M/E603F/A604G/ | ++ |
| | E896L/E1026Y | |
| 511/512 | S66R/R111L/K114R/S177A/A181L/E374S/E603F/T613A/ | + |
| | P853D/T897V/I999C | |
| 513/514 | S66R/R111H/K114G/A181L/R601M/T613A/E896L/T897V/ | + |
| | I999C | |
| 515/516 | S66R/S177A/A181L/V185I/E374S/R601M/A604G | + |
| 517/518 | R111L/K114R/A181L/V185I/E374S/E603F/A604G/I999C/ | + |
| | E1026Y | |
| 519/520 | R111H/K114G/S177A/A181L/V185I/E374S/R601M/E603F/ | + |
| | T613A/E896L | |
| 521/522 | S66R/R111L/K114R/A181L/E374S/R601M/A604G/Q726L/ | + |
| | E1026Y | |
| 523/524 | S66R/V185I/E603F/E896L/T897V | + |
| 525/526 | R111H/K114R/A181L/V185I/R601M/A604G/P853D | + |
| 527/528 | S66R/R111H/K114G/A181L/V185I/R601M/E603F/A604G/ | + |
| | E896L | |
| 529/530 | S177A/A181L/E603F/A604G | + |
| 531/532 | S66R/R111H/K114R/A181L/E374S/R601M/A604G/S623T/ | + |
| | P853D/I999C/E1026Y | |
| 533/534 | S66R/R111H/K114R/A181L/E374S/R601M/E603F/A604G/ | + |
| | S644T/Q726L/E896L | |
| 535/536 | S66R/E374S/R601M/E603F/A604G/P853D/T897V/E1026Y | + |
| 537/538 | S66R/R601M/A604G/E896L/T897V | + |
| 539/540 | R111L/K114R/A181L/E374S | + |

¹ Levels of increased activity were determined relative to the reference polypeptide of SEQ ID NO: 314 and defined as follows: “+” 1.40 to 1.45-fold increased activity; “++” > 1.45-fold increased activity; “+++” > 1.55-fold increased activity.

### Example 11

### Evolution and Screening of Engineered Polypeptides Derived From SEQ ID NO: 162 for Improved Monooxygenase Activity towards Indanone Substrate

[0206] For Examples 11-14, the polypeptides were evaluated for activity towards indanone, as shown in the Scheme 3, below.

[0207] SEQ ID NO: 162 was used to generate the engineered polypeptides of Table 11.2. These polypeptides displayed improved monooxygenase activity in the conversion of indanone (compound (5)) to 3-hydroxy-1-indanone (compound (6)), as compared to the starting polypeptide (Scheme 3).

[0208] Libraries of engineered polypeptides were generated using various techniques (e.g., saturation mutagenesis, recombination of previously identified beneficial amino acid differences) and screened using HTP assay and analysis methods, as indicated.

[0209] The cell pellets were lysed with 400 μL of 100 mM potassium phosphate, pH 8, with 1 g/L lysozyme, and 1 mM MgSO4. The plates were incubated, with shaking, at room temperature for 2 hours. The plates were centrifuged at 4,000 rpm for >15 minutes to pellet cell debris, and the clarified lysates were used in the assay. Reactions were carried out in a 96-well deep-well (2 mL) plates, in 100 μL total volume/well. The indanone substrate (compound (5)) was dissolved in DMSO. Reactions were carried out using 25% (v/v) HTP lysate, 20 g/L indanone (compound (5)), 5 g/L NADP⁺, 1 g/L phosphite dehydrogenase (SEQ ID NO: 788) (PCT/US2018/027450), 200 mM phosphite, pH 8.0, with 10% (v/v) final DMSO concentration. The plates were heat sealed and incubated at 30° C. and 250 rpm for 16 to 20 hours. The reactions were quenched by the addition of 300 μL of acetonitrile into each well. The plates were sealed and shaken on tabletop shakers for 10 minutes. Plates were centrifuged at 4,000 rpm at 4° C. for 10 to 15 minutes. Samples were diluted 67-fold in 50:50 water:acetonitrile prior to LC analysis. described in Table 11.1.

TABLE 11-1
UPLC Parameters for Examples 11-14

| Instrument | Thermo Ultimate 3000 UPLC | |
|---|---|---|
| Column | ACQUITY UPLC HSS T3 Column, 1.8 μm, 2.1 mm × | |
| | 100 mm | |
| | Gradient (A: 0.1% trifluoroacetic acid in water | |
| | B: 0.1% trifluoroacetic acid in acetonitrile | |
| | Time(min) | % B |
| Mobile | 0.00 | 25 |
| Phase | 0.7 | 25 |
| | 1.0 | 35 |
| | 2.0 | 35 |
| | 2.1 | 25 |

| | |
|---|---|
| Flow Rate | 0.7 mL/min |
| Run time | 2.1 min |
| Detector | 254 nm |
| Peak | Indanone substrate (compound (5)) at 1.99 minutes, 3- |
| Retention | hydroxy-indanone product (compound (6)) at 0.55 minutes |
| Times | |
| Column | 40° C. |
| Temperature | |
| Sample | 25° C. |
| Temperature | |
| Injection | 10 μL |
| Volume | |

TABLE 11.2
Activity of Variants Relative to SEQ ID NO: 162

| | | Activity FIOP |
|---|---|---|
| SEQ ID NO: | Amino Acid Differences | (Relative to |
| (nt/aa) | (Relative to SEQ ID NO: 162) | SEQ ID NO: 162) |
| 541/542 | K437N | +++ |
| 543/544 | V179G | +++ |
| 545/546 | V179E | ++ |
| 547/548 | K437M | ++ |
| 549/550 | K437L | ++ |
| 551/552 | K437S | + |
| 553/554 | A181L | + |
| 555/556 | K437V | + |

¹ Levels of increased activity were determined relative to the reference polypeptide of SEQ ID NO: 162 and defined as follows: “+” 1.30 to 1.50-fold increased activity; “++” > 1.50-fold increased activity; “+++” > 2.70-fold increased activity.

### Example 12

### Evolution and Screening of Engineered Polypeptides Derived From SEQ ID NO: 546

[0210] SEQ ID NO: 546 was used to generate the engineered polypeptides of Table 12.1, 12.2, and 12.3. These polypeptides displayed improved monooxygenase activity towards indanone (compound (5)), compared to the starting polypeptide (Scheme 3).

[0211] Libraries of engineered polypeptides were generated using various techniques (e.g., saturation mutagenesis, recombination of previously identified beneficial amino acid differences) and screened using HTP assay and analysis methods, as indicated.

[0212] The cell pellets were lysed with 400 μL of 100 mM potassium phosphate, pH 8, with 1 g/L lysozyme, and 1 mM MgSO4. The plates were incubated, with shaking, at room temperature for 2 hours. The plates were centrifuged at 4,000 rpm for >15 minutes to pellet cell debris, and the clarified lysates were used in the assay. Reactions were carried out in a 96-well deep-well (2 mL) plates, in 100 μL total volume/well. The indanone substrate (compound (5)) was dissolved in DMSO. Reactions were carried out using 20% (v/v) HTP lysate, 40 g/L indanone (compound (5)), 5 g/L NADP⁺, 1 g/L phosphite dehydrogenase (SEQ ID NO: 788) (PCT/US2018/027450), 200 mM phosphite, pH 8.0, with 10% (v/v) final DMSO concentration. The plates were heat sealed and incubated at 30° C. and 250 rpm for 16 to 20 hours. The reactions were quenched by the addition of 300 μL of acetonitrile into each well. The plates were scaled and shaken on tabletop shakers for 10 minutes. Plates were centrifuged at 4,000 rpm at 4° C. for 10 to 15 minutes. Samples were diluted 67-fold in 50:50 water:acetonitrile prior to LC analysis, described in Table 11.1.

TABLE 12.1 Activity of Variants Relative to SEQ ID NO: 546

| | | Activity FIOP |
|---|---|---|
| | | in 10% DMSO |
| SEQ ID NO: | Amino Acid Differences | (Relative to |
| (nt/aa) | (Relative to SEQ ID NO: 546) | SEQ ID NO: 546) |
| 557/558 | S66R/W97Y/R180G/K437M/T613A | +++ |
| 559/560 | D209A/Q404W/G458L/T613A | +++ |
| 561/562 | K114N | +++ |
| 563/564 | S66R/D209A/Q404W/K437L/T613A | +++ |
| 565/566 | R67M | +++ |
| 567/568 | V372Y | +++ |
| 569/570 | V372S | +++ |
| 571/572 | S66R/R180G/Q404W/G458L | +++ |
| 573/574 | I260L | +++ |
| 575/576 | E374R | +++ |
| 577/578 | R180G/Q404W/G458L/T613A | +++ |
| 579/580 | A136V/K437M/T613A | +++ |
| 581/582 | K114R | ++ |
| 583/584 | P171M | ++ |
| 585/586 | R180G/Q404W/T613A | ++ |
| 587/588 | L408T | ++ |
| 589/590 | R180G/T613A | ++ |
| 591/592 | Q404L/K437N/G458L/T613A | ++ |
| 593/594 | V530L | ++ |
| 595/596 | Q547E | ++ |
| 597/598 | T412C | ++ |
| 599/600 | Q547A | ++ |
| 601/602 | R111L | ++ |
| 603/604 | Q547V | ++ |
| 605/606 | E245G | ++ |
| 607/608 | K114V | ++ |
| 609/610 | K114G | ++ |
| 611/612 | V125W | + |
| 613/614 | T412S | + |
| 615/616 | Q74R | + |
| 617/618 | E374S | + |
| 619/620 | S66R/Q404W/K437L/G458L | + |
| 621/622 | P171G | + |
| 623/624 | T412V | + |
| 625/626 | T412N | + |
| 627/628 | L408Q | + |
| 629/630 | A529V | + |
| 631/632 | W97Y/Q404L/K437N/G458L/T613A | + |
| 633/634 | G228L | + |
| 635/636 | R67A | + |
| 637/638 | A502G | + |
| 639/640 | A336S | + |
| 641/642 | R180G/A181L/Q404W/K437M/G458L | + |
| 643/644 | V341C | + |
| 645/646 | V372R | + |
| 647/648 | R67L | + |
| 649/650 | E374A | + |
| 651/652 | E245A | + |
| 653/654 | Q74K | + |
| 655/656 | R111H | + |
| 657/658 | V372F | + |
| 659/660 | R180G/A181L | + |
| 661/662 | Q547S | + |
| 663/664 | E245R | + |
| 665/666 | L483M | + |
| 667/668 | G522H | + |
| 669/670 | V121M | + |

¹ Levels of increased activity were determined relative to the reference polypeptide of SEQ ID NO: 546 and defined as follows: “+” 1.70 to 4.50-fold increased activity; “++” > 4.50-fold increased activity; “+++” > 6.30-fold increased activity.

[0213] The activity of variants was also evaluated in 15% DMSO. Reactions were carried out in a 96-well deep-well (2 mL) plates, in 100 μL total volume/well. The indanone substrate (compound (5)) was dissolved in DMSO. Reactions were carried out using 20% (v/v) HTP lysate, 40 g/L indanone (compound (5)), 5 g/L NADP⁺, 1 g/L phosphite dehydrogenase (SEQ ID NO: 788) (PCT/US2018/027450), 200 mM phosphite, pH 8.0, with 15% (v/v) final DMSO concentration. The plates were heat sealed and incubated at 30° C., and 250 rpm for 16 to 20 hours. The reactions were quenched by the addition of 300 μL of acetonitrile into each well. The plates were sealed and shaken on tabletop shakers for 10 minutes. Plates were centrifuged at 4,000 rpm at 4° C. for 10 to 15 minutes. Samples were diluted 67-fold in 50:50 water:acetonitrile prior to LC analysis, described in Table 11.1.

TABLE 12.2
Activity of Variants Relative to SEQ ID NO: 546

| | | Activity FIOP |
|---|---|---|
| | | in 15% DMSO |
| SEQ ID NO: | Amino Acid Differences | (Relative to |
| (nt/aa) | (Relative to SEQ ID NO: 546) | SEQ ID NO: 546) |
| 561/562 | K114N | +++ |
| 563/564 | S66R/D209A/Q404W/K437L/T613A | +++ |
| 557/558 | S66R/W97Y/R180G/K437M/T613A | +++ |
| 559/560 | D209A/Q404W/G458L/T613A | +++ |
| 565/566 | R67M | +++ |
| 591/592 | Q404L/K437N/G458L/T613A | +++ |
| 577/578 | R180G/Q404W/G458L/T613A | +++ |
| 567/568 | V372Y | +++ |
| 569/570 | V372S | +++ |
| 585/586 | R180G/Q404W/T613A | +++ |
| 631/632 | W97Y/Q404L/K437N/G458L/T613A | +++ |
| 579/580 | A136V/K437M/T613A | +++ |
| 593/594 | V530L | ++ |
| 581/582 | K114R | ++ |
| 575/576 | E374R | ++ |
| 583/584 | P171M | ++ |
| 605/606 | E245G | ++ |
| 595/596 | Q547E | ++ |
| 587/588 | L408T | ++ |
| 571/572 | S66R/R180G/Q404W/G458L | ++ |
| 589/590 | R180G/T613A | ++ |
| 607/608 | K114V | ++ |
| 609/610 | K114G | ++ |
| 601/602 | R111L | ++ |
| 627/628 | L408Q | ++ |
| 573/574 | I260L | ++ |
| 603/604 | Q547V | ++ |
| 597/598 | T412C | ++ |
| 599/600 | Q547A | ++ |
| 611/612 | V125W | ++ |
| 663/664 | E245R | + |
| 615/616 | Q74R | + |
| 621/622 | P171G | + |
| 633/634 | G228L | + |
| 619/620 | S66R/Q404W/K437L/G458L | + |
| 625/626 | T412N | + |
| 629/630 | A529V | + |
| 613/614 | T412S | + |
| 651/652 | E245A | + |
| 623/624 | T412V | + |
| 645/646 | V372R | + |
| 617/618 | E374S | + |
| 655/656 | R111H | + |
| 667/668 | G522H | + |
| 641/642 | R180G/A181L/Q404W/K437M/G458L | + |
| 635/636 | R67A | + |
| 643/644 | V341C | + |
| 665/666 | L483M | + |
| 653/654 | Q74K | + |
| 637/638 | A502G | + |
| 671/672 | R111A | + |
| 673/674 | T412M | + |
| 639/640 | A336S | + |
| 647/648 | R67L | + |
| 675/676 | R180S/Q404W/G458L/T613A | + |
| 661/662 | Q547S | + |
| 657/658 | V372F | + |
| 649/650 | E374A | + |
| 669/670 | V121M | + |

¹ Levels of increased activity were determined relative to the reference polypeptide of SEQ ID NO: 546 and defined as follows: “+” 1.50 to 3.20-fold increased activity; “++” > 3.20-fold increased activity; “+++” > 5.00-fold increased activity; “+++” > 5.00-fold increased activity.

[0214] The activity of variants was also evaluated in 20% DMSO. Reactions were carried out in a 96-well deep-well (2 mL) plates, in 100 μL total volume/well. The indanone substrate (compound (5)) was dissolved in DMSO. Reactions were carried out using 20% (v/v) HTP lysate, 40 g/L indanone (compound (5)), 5 g/L NADP⁺, 1 g/L phosphite dehydrogenase (SEQ ID NO: 788) (PCT/US2018/027450), 200 mM phosphite, pH 8.0, with 20% (v/v) final DMSO concentration. The plates were heat sealed and incubated at 30° C., and 250 rpm for 16 to 20 hours. The reactions were quenched by the addition of 300 μL of acetonitrile into each well. The plates were sealed and shaken on tabletop shakers for 10 minutes. Plates were centrifuged at 4,000 rpm at 4° C. for 10 to 15 minutes. Samples were diluted 67-fold in 50:50 water:acetonitrile prior to LC analysis, described in Table 11.1.

TABLE 12.3
Activity of Variants Relative to SEQ ID NO: 546

| | | Activity FIOP |
|---|---|---|
| | | in 20% DMSO |
| SEQ ID NO: | Amino Acid Differences | (Relative to |
| (nt/aa) | (Relative to SEQ ID NO: 546) | SEQ ID NO: 546) |
| 561/562 | K114N | +++ |
| 569/570 | V372S | +++ |
| 593/594 | V530L | +++ |
| 567/568 | V372Y | +++ |
| 575/576 | E374R | +++ |
| 565/566 | R67M | +++ |
| 599/600 | Q547A | +++ |
| 587/588 | L408T | +++ |
| 627/628 | L408Q | ++ |
| 583/584 | P171M | ++ |
| 595/596 | Q547E | ++ |
| 611/612 | V125W | ++ |
| 605/606 | E245G | + |
| 615/616 | Q74R | ++ |
| 581/582 | K114R | + |
| 625/626 | T412N | ++ |
| 653/654 | Q74K | ++ |
| 629/630 | A529V | ++ |
| 603/604 | Q547V | + |
| 597/598 | T412C | ++ |
| 663/664 | E245R | ++ |
| 645/646 | V372R | + |
| 607/608 | K114V | + |
| 621/622 | P171G | + |
| 633/634 | G228L | + |
| 667/668 | G522H | + |
| 573/574 | I260L | + |
| 637/638 | A502G | + |
| 559/560 | D209A/Q404W/G458L/T613A | + |
| 669/670 | V121M | + |
| 631/632 | W97Y/Q404L/K437N/G458L/T613A | + |
| 585/586 | R180G/Q404W/T613A | + |
| 577/578 | R180G/Q404W/G458L/T613A | + |
| 601/602 | R111L | + |
| 589/590 | R180G/T613A | + |
| 571/572 | S66R/R180G/Q404W/G458L | + |
| 675/676 | R180S/Q404W/G458L/T613A | + |

¹ Levels of increased activity were determined relative to the reference polypeptide of SEQ ID NO: 546 and defined as follows: “+” 1.50 to 2.50-fold increased activity; “++” > 2.50-fold increased activity; “+++” > 3.30-fold increased activity.

### Example 13

### Evolution and Screening of Engineered Polypeptides Derived From SEQ ID NO: 578

[0215] SEQ ID NO: 578 was used to generate the engineered polypeptides of Table 13.1. These polypeptides displayed improved monooxygenase activity towards indanone (compound (5)), compared to the starting polypeptide (Scheme 3).

[0216] Libraries of engineered polypeptides were generated using various techniques (e.g., saturation mutagenesis, recombination of previously identified beneficial amino acid differences) and screened using HTP assay and analysis methods, as indicated.

[0217] The cell pellets were lysed with 400 μL of 100 mM potassium phosphate, pH 8, with 1 g/L lysozyme, and 1 mM MgSO4. The plates were incubated, with shaking, at room temperature for 2 hours. The plates were centrifuged at 4,000 rpm for >15 minutes to pellet cell debris, and the clarified lysates were used in the assay. Reactions were carried out in a 96-well deep-well (2 mL) plates, in 100 μL total volume/well. The indanone substrate (compound (5)) was dissolved in DMSO. Reactions were carried out using 20% (v/v) HTP lysate, 40 g/L indanone (compound (5)), 5 g/L NADP⁺, 1 g/L phosphite dehydrogenase (SEQ ID NO: 788) (PCT/US2018/027450), 200 mM phosphite, pH 8.0, with 10% (v/v) final DMSO concentration. The plates were heat sealed and incubated at 30° C. and 250 rpm for 16 to 20 hours. The reactions were quenched by the addition of 300 μL of acetonitrile into each well. The plates were sealed and shaken on tabletop shakers for 10 minutes. Plates were centrifuged at 4,000 rpm at 4° C. for 10 to 15 minutes. Samples were diluted 67-fold in 50:50 water:acetonitrile prior to LC analysis, described in Table 11.1.

TABLE 13.1
Activity of Variants Relative to SEQ ID NO: 578

| | | Activity FIOP |
|---|---|---|
| SEQ ID NO: | Amino Acid Differences | (Relative to |
| (nt/aa) | (Relative to SEQ ID NO: 578) | SEQ ID NO: 578) |
| 677/678 | S66R/R111H/K114G/T412Q/K437M | +++ |
| 679/680 | R111L/K114G/E245A/1260L | +++ |
| 681/682 | R111L/K114G/T412Q | +++ |
| 683/684 | R111L/K114G | +++ |
| 685/686 | R111L/1260L/V372Y | +++ |
| 687/688 | S66R/R111L/K437M | ++ |
| 689/690 | R111H/K114G | ++ |
| 691/692 | S66R/R111L/K114R/E245A | ++ |
| 693/694 | S66R/R111H/V372Y/Q547S | ++ |
| 695/696 | S66R/R111L/K114G/1260L/T412Q/ | ++ |
| | Q547S | |
| 697/698 | S66R/R111L/V341C/E374S | ++ |
| 699/700 | R111L/P171L/V372S/E374S | ++ |
| 701/702 | R111L/P171L/E374S | ++ |
| 703/704 | R111L/K114G/P171L/1260L/V341C | ++ |
| 705/706 | R111L/K114R/1260L/V372S/E374S/ | + |
| | K437M | |
| 707/708 | S66R/R111L/K114R/P171L/Q547S | + |
| 709/710 | S66R/R111L | + |
| 711/712 | R111L | + |
| 713/714 | E603F | + |
| 715/716 | S66R/R111H/P171L/E245A/Q547S | + |
| 717/718 | R111L/K114R/E245A/V372S | + |
| 719/720 | R601M | + |
| 721/722 | S623Q | + |
| 723/724 | K337E/D624Q | + |

¹ Levels of increased activity were determined relative to the reference polypeptide of SEQ ID NO: 578 and defined as follows: “+” 1.50 to 2.00-fold increased activity; “++” > 2.00-fold increased activity; “+++” > 2.70-fold increased activity.

### Example 14

### Evolution and Screening of Engineered Polypeptides Derived From SEQ ID NO: 680

[0218] SEQ ID NO: 680 was used to generate the engineered polypeptides of Table 14.1. These polypeptides displayed improved monooxygenase activity towards indanone (compound (5)), compared to the starting polypeptide (Scheme 3).

[0219] Libraries of engineered polypeptides were generated using various techniques (e.g., saturation mutagenesis, recombination of previously identified beneficial amino acid differences) and screened using HTP assay and analysis methods, as indicated.

[0220] The cell pellets were lysed with 400 μL of 100 mM potassium phosphate, pH 8, with 1 g/L lysozyme, and 1 mM MgSO4. The plates were incubated, with shaking, at room temperature for 2 hours. The plates were centrifuged at 4,000 rpm for >15 minutes to pellet cell debris, and the clarified lysates were used in the assay. Reactions were carried out in a 96-well deep-well (2 mL) plates, in 100 μL total volume/well. The indanone substrate (compound (5) was dissolved in DMSO. Reactions were carried out using 30% (v/v) HTP lysate, 40 g/L indanone (compound (5), 5 g/L NADP⁺, 1 g/L phosphite dehydrogenase (SEQ ID NO: 788) (PCT/US2018/027450), 200 mM phosphite, pH 8.0, with 10% (v/v) final DMSO concentration. The plates were heat sealed and incubated at 30° C. and 250 rpm for 16 to 20 hours. The reactions were quenched by the addition of 300 μL of acetonitrile into each well. The plates were sealed and shaken on tabletop shakers for 10 minutes. Plates were centrifuged at 4,000 rpm at 4° C. for 10 to 15 minutes. Samples were diluted 67-fold in 50:50 water:acetonitrile prior to LC analysis, described in Table 11.1.

TABLE 14.1
Activity of Variants Relative to SEQ ID NO: 680

| | | Activity FIOP |
|---|---|---|
| SEQ ID NO: | Amino Acid Differences | (Relative to |
| (nt/aa) | (Relative to SEQ ID NO: 680) | SEQ ID NO: 680) |
| 725/726 | S66R/E374S/R601M/A604G/Q726L | +++ |
| 727/728 | S66R/L111H/R601M/A604G/S623T/Q726L/P853D | +++ |
| 729/730 | S66R/E374S/Q726L/I999C | +++ |
| 731/732 | L111H/E374S/E603F/A604G/S623Q/Q726L | +++ |
| 733/734 | E374S/E603F/A604G/S644T | +++ |
| 735/736 | E603F/A604G/Q726L/E896L/T897V | +++ |
| 737/738 | L111H/E603F/A604G/S623Q/Q726L/E896L | ++ |
| 739/740 | S66R/E374S/R601M/E603F/A604G/Q726L/P853D/E1026Y | ++ |
| 741/742 | A604G/Q726L/P853D/I999C/E1026Y | ++ |
| 743/744 | S66R/R601M/E603F/A604G/E896L | ++ |
| 745/746 | S66R/G114R/R601M/A604G/Q726L/I999C | ++ |
| 747/748 | S623Q/S644T/Q726L/E1026Y | ++ |
| 749/750 | E374S/R601M/E603F/Q726L/E896L/T897V | ++ |
| 751/752 | Q726L/T897V | ++ |
| 753/754 | L111H/G114R/E374S/E603F/A604G/Q726L/E896L/T897V | + |
| 755/756 | G114R/E374S/E603F/A604G/S623T/Q726L/P853D/T897V | + |
| 757/758 | S66R/L111H/R601M/A604G/P853D | + |
| 759/760 | E374S/P853D/T897V/I999C/E1026Y | + |
| 761/762 | R601M/A604G/Q726L/T897V | + |
| 763/764 | L111H/E603F/A604G/E896L | + |
| 765/766 | S66R/L111H/E603F/Q726L | + |
| 767/768 | S66R/S623Q | + |
| 769/770 | S66R/E603F/S623Q/Q726L/P853D/E896L/T897V | + |
| 771/772 | G114R/R601M/E603F/A604G | + |
| 773/774 | E374S/E603F/A604G/Q726L/P853D/I999C | + |
| 775/776 | E374S/S623T/Q726L/P853D/E896L/I999C | + |
| 777/778 | L111H/G114R/R601M/S623Q/Q726L | + |
| 779/780 | R601M/A604G/Q726L | + |
| 781/782 | L111H/E603F/A604G/Q726L/P853D | + |
| 783/784 | L111H/S623T | + |

¹ Levels of increased activity were determined relative to the reference polypeptide of SEQ ID NO: 680 and defined as follows: “+” 1.50 to 2.00-fold increased activity; “++” > 2.00-fold increased activity; “+++” > 2.90-fold increased activity.

[0221] While the invention has been described with reference to the specific embodiments, various changes can be made and equivalents can be substituted to adapt to a particular situation, material, composition of matter, process, process step or steps, thereby achieving benefits of the invention without departing from the scope of what is claimed.

[0222] For all purposes in the United States of America, each and every publication and patent document cited in this disclosure is incorporated herein by reference as if each such publication or document was specifically and individually indicated to be incorporated herein by reference. Citation of publications and patent documents is not intended as an indication that any such document is pertinent prior art, nor does it constitute an admission as to its contents or date.

What is claimed is:

1. An engineered cytochrome P450-BM3 variant comprising a polypeptide sequence having at least 85%, 86%, 87%, 88%, 89%, 90%, 91%, 92%, 93%, 94%, 95%, 96%, 97%, 98%, 99%, or more sequence identity to SEQ ID NO: 92, 2, 96, 142, 162, 216, 288, 314, 546, 578, or 680, or a functional fragment thereof, wherein the polypeptide sequence of said engineered cytochrome P450-BM3 variant comprises at least one substitution or substitution set and wherein the amino acid positions of said polypeptide sequence are numbered with reference to SEQ ID NO: 92, 2, 96, 142, 162, 216, 288, 314, 546, 578, or 680.

2. The engineered cytochrome P450-BM3 variant of claim 1, wherein said polypeptide sequence has at least 85%, 86%, 87%, 88%, 89%, 90%, 91%, 92%, 93%, 94%, 95%, 96%, 97%, 98%, 99%, or more sequence identity to SEQ ID NO: 2, and wherein the polypeptide sequence of said engineered cytochrome P450-BM3 variant comprises at least one substitution or substitution set at one or more positions in said polypeptide sequence selected from 105/256/433/453/853, 75, 75/607, 78, 86, 105/256/433/550, 105/256/433/550/600/683/760/825, 105/256/550, 105/453/574, 147, 151, 154, 159, 179, 182, 182/573, 186, 254, 256, 256/433/453/550/663/685, 256/433/550/574/853, 256/433/574/584/663/748/825, 256/433/574/600, 256/663/915, 256/748/853, 330, 333, 349/574/600/623/825/853/915, 433/550, 433/561/574/600/663, 434, 437, 453/729, 561/574/663/915, 574/600/748, 584, 729, and 748, wherein the amino acid positions of said polypeptide sequence are numbered with reference to SEQ ID NO: 2.

3. The engineered cytochrome P450-BM3 variant of claim 1, wherein said polypeptide sequence has at least 85%, 86%, 87%, 88%, 89%, 90%, 91%, 92%, 93%, 94%, 95%, 96%, 97%, 98%, 99%, or more sequence identity to SEQ ID NO: 92, and wherein the polypeptide sequence of said engineered cytochrome P450-BM3 variant comprises at least one substitution or substitution set at one or more positions in said polypeptide sequence selected from 75, 75/404, 75/404/437, 75/437, 147, 147/154, 147/254/331, 147/331, 151, 154/185, 179, 179/186, 179/186/437, 179/404, 185/237/331/434, 186, 186/404, 217/437, 259/437, 331, 404, and 437, wherein the amino acid positions of said polypeptide sequence are numbered with reference to SEQ ID NO: 92.

4. The engineered cytochrome P450-BM3 variant of claim 1, wherein said polypeptide sequence has at least 85%, 86%, 87%, 88%, 89%, 90%, 91%, 92%, 93%, 94%, 95%, 96%, 97%, 98%, 99%, or more sequence identity to SEQ ID NO: 96, and wherein the polypeptide sequence of said engineered cytochrome P450-BM3 variant comprises at least one substitution or substitution set at one or more positions in said polypeptide sequence selected from 75, 178/618, 209, 213, and 259, wherein the amino acid positions of said polypeptide sequence are numbered with reference to SEQ ID NO: 96.

5. The engineered cytochrome P450-BM3 variant of claim 1, wherein said polypeptide sequence has at least 85%, 86%, 87%, 88%, 89%, 90%, 91%, 92%, 93%, 94%, 95%, 96%, 97%, 98%, 99%, or more sequence identity to SEQ ID NO: 142, and wherein the polypeptide sequence of said engineered cytochrome P450-BM3 variant comprises at least one substitution or substitution set at one or more positions in said polypeptide sequence selected from 29/209/210/435/437, 29/213/333/435, 209/210/259/435, 209/213/355/435/437, 333/435, 349/618, 454, 458, 458/618, 511/792, 553, 618/748, 655, 885, 888, 930, and 994, wherein the amino acid positions of said polypeptide sequence are numbered with reference to SEQ ID NO: 142.

6. The engineered cytochrome P450-BM3 variant of claim 1, wherein said polypeptide sequence has at least 85%, 86%, 87%, 88%, 89%, 90%, 91%, 92%, 93%, 94%, 95%, 96%, 97%, 98%, 99%, or more sequence identity to SEQ ID NO: 162, and wherein the polypeptide sequence of said engineered cytochrome P450-BM3 variant comprises at least one substitution or substitution set at one or more positions in said polypeptide sequence selected from 39/53/55/81/216/253, 53/55/59/79/81/253, 53/55/81/206/253, 53/59, 55/59, 55/59/125/206, 55/59/206, 59/81/216/253, 66/209/349, 66/209/349/458, 66/355/435/454/458/553/613/770/888, 66/355/454/458/553/888/930, 66/435/458/613/770/885/888/930, 66/458/553/930, 76/79/83/182/268/329, 76/83/329, 79/182, 79/185/216, 79/253, 79/264/268/329, 79/329, 81, 82/83, 82/86/88/209/213, 82/86/178/209/210/213/261, 83/86/88/210/213, 83/178/210, 86/178/209/210, 88, 178/209/210/213, 178/209/213/260/261, 178/209/260, 179, 181, 182/329, 185/206/216/253, 209, 209/210/261, 209/260, 210/213, 260/261, 209/349/355/435/770/888, 209/355/454/458/770, 209/435/454/458/613/770/885, 209/435/613, 209/458/553/613, 329, 329/439, and 437, wherein the amino acid positions of said polypeptide sequence are numbered with reference to SEQ ID NO: 162.

7. The engineered cytochrome P450-BM3 variant of claim 1, wherein said polypeptide sequence has at least 85%, 86%, 87%, 88%, 89%, 90%, 91%, 92%, 93%, 94%, 95%, 96%, 97%, 98%, 99%, or more sequence identity to SEQ ID NO: 216, and wherein the polypeptide sequence of said engineered cytochrome P450-BM3 variant comprises at least one substitution or substitution set at one or more positions in said polypeptide sequence selected from 75, 81, 177, 178, 181, 185, and 437, wherein the amino acid positions of said polypeptide sequence are numbered with reference to SEQ ID NO: 216.

8. The engineered cytochrome P450-BM3 variant of claim 1, wherein said polypeptide sequence has at least 85%, 86%, 87%, 88%, 89%, 90%, 91%, 92%, 93%, 94%, 95%, 96%, 97%, 98%, 99%, or more sequence identity to SEQ ID NO: 288, and wherein the polypeptide sequence of said engineered cytochrome P450-BM3 variant comprises at least one substitution or substitution set at one or more positions in said polypeptide sequence selected from 66/79, 66/79/81, 66/79/81/181/210/435/437, 66/79/81/185/435/437/458, 66/79/81/206/435/437/613, 66/79/81/206/437/458, 66/79/81/435/437/458, 66/79/81/437/613, 66/79/177/206/435/458/613, 66/79/181, 66/79/181/185/210/437/458/613, 66/79/185/210/437/458/613, 66/79/206, 66/79/206/435/437, 66/79/206/435/613, 66/79/209/210/437/613, 66/79/435, 66/79/435/437, 66/79/435/458, 66/79/437/458, 66/79/458/613, 66/178/435/437/458, 66/181/185/437, 66/181/185/458, 66/206/435/437, 66/206/437/458, 66/435/437, 66/435/437/458, 66/435/437/613, 66/437/458, 66/458, 79, 79/81/177/206/437/458/613, 79/81/181/437/458/613, 79/81/206/435/437, 79/81/206/613, 79/81/435/458/613, 79/81/437/613, 79/81/613, 79/177/206/437/458/613, 79/177/435/437/458, 79/181/185/209/210/437/458/613, 79/181/185/210/435/437, 79/181/185/210/435/437/458, 79/181/185/437, 79/181/209/437/613, 79/181/209/458/613, 79/181/210/458, 79/185/458, 79/206, 79/206/213/437/613, 79/206/435/437, 79/206/435/613, 79/206/458, 79/206/458/613, 79/210/437/458/613, 79/213/437/458, 79/435, 79/435/437/458, 79/435/437/613, 79/435/613, 79/437, 79/437/458, 79/458, 79/458/613, 79/613, 81/181/185/209/210/437/458/613, 95/177/437, 177/206/435/437/458, 177/435/437/613, 177/437, 178/437/458, 181/185/435/437, 181/185/435/437/613, 181/185/437, 181/185/437/458, 185/208/437/458, 185/435/437, 206/435/437, 206/437, 206/437/458/613, 435/437, 435/437/458, 435/437/458/613, 435/437/613, 437, 437/458, 437/458/613, 437/613, and 437/621, wherein the amino acid positions of said polypeptide sequence are numbered with reference to SEQ ID NO: 288.

9. The engineered cytochrome P450-BM3 variant of claim 1, wherein said polypeptide sequence has at least 85%, 86%, 87%, 88%, 89%, 90%, 91%, 92%, 93%, 94%, 95%, 96%, 97%, 98%, 99%, or more sequence identity to SEQ ID NO: 314, and wherein the polypeptide sequence of said engineered cytochrome P450-BM3 variant comprises at least one substitution or substitution set at one or more positions in said polypeptide sequence selected from 66/111/114/177/181/185/374/603/613/726/853/896/897/999, 66/111/114/177/181/374/603/613/853/897/999, 66/111/114/177/181/374/603/644/853/896/999, 66/111/114/177/181/601/603/604/613/726/1026, 66/111/114/181/185/374, 66/111/114/181/185/374/603/604/897, 66/111/114/181/185/601/603/604/896, 66/111/114/181/185/601/603/604/896/1026, 66/111/114/181/374/601/603/604/644/726/896, 66/111/114/181/374/601/604/623/853/999/1026, 66/111/114/181/374/601/604/726/1026, 66/111/114/181/601/613/896/897/999, 66/111/114/181/603/613/726/853/897/999, 66/111/114/374/604/613/896/897/999, 66/177/181/185/374/601/604, 66/185/601/604/613/726/853/1026, 66/185/603/896/897, 66/374/601/603/604/853/897/1026, 66/601/604/896/897, 111/114/177/181/185/374/601/603/613/896, 111/114/181/185/374/603/604/999/1026, 111/114/181/185/601/604/853, 111/114/181/374, and 177/181/603/604, wherein the amino acid positions of said polypeptide sequence are numbered with reference to SEQ ID NO: 314.

10. The engineered cytochrome P450-BM3 variant of claim 1, wherein said polypeptide sequence has at least 85%, 86%, 87%, 88%, 89%, 90%, 91%, 92%, 93%, 94%, 95%, 96%, 97%, 98%, 99%, or more sequence identity to SEQ ID NO: 546, and wherein the polypeptide sequence of said engineered cytochrome P450-BM3 variant comprises at least one substitution or substitution set at one or more positions in said polypeptide sequence selected from 66/97/180/437/613, 66/180/404/458, 66/209/404/437/613, 66/404/437/458, 67, 74, 97/404/437/458/613, 111, 114, 121, 125, 136/437/613, 171, 180/181, 180/181/404/437/458, 180/404/458/613, 180/404/613, 180/613, 209/404/458/613, 228, 245, 260, 336, 341, 372, 374, 404/437/458/613, 408, 412, 483, 502, 522, 529, 530, and 547, wherein the amino acid positions of said polypeptide sequence are numbered with reference to SEQ ID NO: 546.

11. The engineered cytochrome P450-BM3 variant of claim 1, wherein said polypeptide sequence has at least 85%, 86%, 87%, 88%, 89%, 90%, 91%, 92%, 93%, 94%, 95%, 96%, 97%, 98%, 99%, or more sequence identity to SEQ ID NO: 578, and wherein the polypeptide sequence of said engineered cytochrome P450-BM3 variant comprises at least one substitution or substitution set at one or more positions in said polypeptide sequence selected from 66/111, 66/111/114/171/547, 66/111/114/245, 66/111/114/260/412/547, 66/111/114/412/437, 66/111/171/245/547, 66/111/341/374, 66/111/372/547, 66/111/437, 111, 111/114, 111/114/171/260/341, 111/114/245/260, 111/114/245/372, 111/114/260/372/374/437, 111/114/412, 111/171/372/374, 111/171/374, 111/260/372, 337/624, 601, 603, and 623, wherein the amino acid positions of said polypeptide sequence are numbered with reference to SEQ ID NO: 578.

12. The engineered cytochrome P450-BM3 variant of claim 1, wherein said polypeptide sequence has at least 85%, 86%, 87%, 88%, 89%, 90%, 91%, 92%, 93%, 94%, 95%, 96%, 97%, 98%, 99%, or more sequence identity to SEQ ID NO: 680, and wherein the polypeptide sequence of said engineered cytochrome P450-BM3 variant comprises at least one substitution or substitution set at one or more positions in said polypeptide sequence selected from 66/111/601/604/623/726/853, 66/111/601/604/853, 66/111/603/726, 66/114/601/604/726/999, 66/374/601/603/604/726/853/1026, 66/374/601/604/726, 66/374/726/999, 66/601/603/604/896, 66/603/623/726/853/896/897, 66/623, 111/114/374/603/604/726/896/897, 111/114/601/623/726, 111/374/603/604/623/726, 111/603/604/623/726/896, 111/603/604/726/853, 111/603/604/896, 111/623, 114/374/603/604/623/726/853/897, 114/601/603/604, 374/601/603/726/896/897, 374/603/604/644, 374/603/604/726/853/999, 374/623/726/853/896/999, 374/853/897/999/1026, 601/604/726, 601/604/726/897, 603/604/726/896/897, 604/726/853/999/1026, 623/644/726/1026, and 726/897, wherein the amino acid positions of said polypeptide sequence are numbered with reference to SEQ ID NO: 680.

13. The engineered cytochrome P450-BM3 variant of claim 1, wherein said engineered cytochrome P450-BM3 variant comprises a polypeptide sequence that:
(a) is at least 85%, 86%, 87%, 88%, 89%, 90%, 91%, 92%, 93%, 94%, 95%, 96%, 97%, 98%, 99% or more identical to the sequence of at least one engineered cytochrome P450-BM3 variant set forth in Table 2.2, 4.1, 5.1, 5.2, 6.1, 7.1, 7.3, 8.1, 9.1, 10.1, 11.2, 12.1, 12.2, 12.3, 13.1, and 14.1;
(b) is at least 85%, 86%, 87%, 88%, 89%, 90%, 91%, 92%, 93%, 94%, 95%, 96%, 97%, 98%, 99% or more identical to SEQ ID NO: 2, 92, 96, 142, 162, 216, 288, 314, 546, 578, or 680;
(c) comprises a sequence set forth in SEQ ID NO: 92, 96, 142, 162, 216, 288, 314, 546, 578, or 680;
(d) is at least 85%, 86%, 87%, 88%, 89%, 90%, 91%, 92%, 93%, 94%, 95%, 96%, 97%, 98%, 99% or more identical to the sequence of at least one engineered cytochrome P450-BM3 variant set forth in the even numbered sequences of SEQ ID NOS: 4-784; and/or
(e) comprises a polypeptide sequence forth in at least one of the even numbered sequences of SEQ ID NOS: 4-784.

14. The engineered cytochrome P450-BM3 variant of claim 1, wherein said engineered cytochrome P450-BM3 variant comprises at least one improved property compared to a wild-type Bacillus megaterium cytochrome P450-BM3 variant.

15. The engineered cytochrome P450-BM3 variant of claim 14, wherein said improved property comprises:
(a) improved activity on a substrate; optionally, wherein said substrate comprises 4-O-aryl-7-methylsulfonyl-indanone (compound (1)), 4-methoxy-7-methylsulfonyl-indanone (compound (3)), or indanone (compound (5)); and/or
(b) improved production of 3-hydroxy-4-methoxy-7-methylsulfonyl-indanone (compound (2)), 3-hydroxy-4-O-aryl-7-methylsulfonyl-indanone (compound (4)), or 3-hydroxy-1-indanone (compound (6)).

16. A composition comprising at least one engineered cytochrome P450-BM3 variant of claim 1.

17. A polynucleotide sequence encoding at least one engineered cytochrome P450-BM3 variant of claim 1.

18. The polynucleotide sequence of claim 17, wherein said polynucleotide sequence:
(a) is operably linked to a control sequence;
(b) is codon optimized; and/or
(c) comprises a polynucleotide sequence forth in the odd numbered sequences of SEQ ID NOS: 3-783.

19. A host cell comprising at least one polynucleotide sequence of claim 18.

20. A method of producing an engineered cytochrome P450-BM3 variant in a host cell, comprising culturing the host cell of claim 19, under suitable conditions, such that at least one engineered cytochrome P450-BM3 variant is produced.

The application's sequence listing, which the Patent Office published only in electronic form, follows.

SEQUENCE LISTING (788 sequences)

SEQ ID NO: 1 - DNA, 3147 bp, synthetic construct
  misc_feature 1..3147: note = cytochrome P450 wild type
  source 1..3147: mol_type = other DNA
atgacaataaaggaaatgccgcagccgaaaacgtttggagaacttaaaaatttaccgttattaaacacagataaaccggttcaagctttgatgcgtattgcggatgaattaggagaaatctttaaattcgaggcgcctggtagcgtaacgcgctttttatcaagtcagcgtctaattaaagaagcatgcgatgaatcacgctttgataaaaacttaagtcaagcgcttaaatttgcacgtgattttcttggagacgggttatttacaagctggacgcatgaaccgaattggaaaaaagcgcataatatcttacttccaagctttagtcagcgtgcaatgaaacgttatcatgcgatgatggtcgatatcgccgtgcagcttgttcaaaagtgggagcgtctaaatgcagatgagcatattgaagtatcggaagacatgacacgtttaacgcttgatacaattggtctttgcggctttaactatcgctttaacagcttttaccgagatcagcctcatccatttattgtgagtatggtccgtgcactggatgaagtaatgaacaagctgcagcgagcaaatccagacgacccagcttatgatgaaaacaagcgccagtgtcaagaagatatcaaggtgatgaacgactatgtagataaaattattgcagatcgcaaagcaaggggtgaacaaagccatgatttattaacgcagatgctaaacggaaaagatccagaaacgggtgagccgcttgatgacgggaacattagctatcaaattattacattcttaattgcgggacacgaaacaacaagtggtcttttatcatttgcgctgtatttcttagtgaaaaatccacatgtattacaaaaagtagcagaagaagcagcacgagttctagtagatcctgttccaagctacaaacaagtcaaacagcttaaatatgtcggcatggtcttaaacgaagcgctgcgcttatggccaactgctcctgcgttttccctatatgcaaaagaagatacggtgcttggaggagaatatcctttaaccaaaggcgacgaagtaatggttctgattcctcagcttcaccgtgataaaacaatttggggagacgatgtggaggagttccgtccagagcgttttgaaaatccaagtgcgattccgcagcatgcgtttaaaccgtttggaaacggtcagcgtgcgtgtatcggtcagcagttcgctcttcatgaagcaacgctggtacttggtatgatgctaaaacactttgactttgaagatcatacaaactacgagctcgatattaaagaaactttaacgttaaaacctgaaggctttgtggtaaaagcaaaatcgaaaaaaattccgcttggcggtattccttcacctagcactgaacagtctgctaaaaaagtacgcaaaaaggcagaaaacgctcataatacgccgctgcttgtgctatacggttcaaatgcgggaacagctgaaggaacggcgcgtgatttagcagatattgcaatgagcaaaggatttgcaccgcaggtcgcaacgcttgattcacacgccggaaatcttccgcgcgaaggagctgtattaattgtaacggcgtcttataacggtcatccgcctgataacgcaaagcaatttgtcgactggttagaccaagcgtctgctgatgaagtaaaaggcgttcgctactccgtatttggatgcggcgataaaaactgggctgcgacgtatcaaaaagtgcctgcttttatcgatgaaacgcttgccgctaaaggggcagaaaacatcgctgaccgcggtgaagcagatgcaagcgacgactttgaaggcacatatgaagaatggcgtgatcatatgtggagtgacgtagcagcctactttaacctcgacattgaaaacagtgaagataataaatctactctttcacttcaatttgtcgacagcgccgcggatatgccgcttgcgaaaatgcacggtgcgttttcaacgaacgtcgtagcaagcaaagaacttcaacagccaggcagtgcacgaagcacgcgacatcttgaaattgaacttccaaaagaagcttcttatcaagaaggagatcatttaggtgttattcctcgcaactatgaaggaatagtaaaccgtgtaacagcaaggttcggcctaagcgcatcacagcaaatccgtctggaagcagaagaagaaaaattagctcatttgccactcgctaaaacagtatccgtagaagagcttctgcaatacgtggagcttcaagatcctgttacgcgcacgcagcttcgcgcaatggctgctaaaacggtctgcccgccgcataaagtagagcttgaagccttgcttgaaaagcaagcctacaaagaacaagtgctggcaaaacgtttaacaatgcttgaactgcttgaaaaatacccggcgtgtgaaatgaaattcagcgaatttatcgcccttctgccaagcatacgcccgcgctattactcgatttcttcatcacctcgtgtcgatgaaaaacaagcaagcatcacggtcagcgttgtctcaggagaagcgtggagcggatatggagaatataaaggaattgcgtcgaactatcttgccgagctgcaagaaggagatacgattacgtgctttatttccacaccgcagtcagaatttacgctgccaaaagaccctgaaacgccgcttatcatggtcggaccgggaacaggcgtcgcgccgtttagaggctttgtgcaggcgcgcaaacagctaaaagaacaaggacagtcacttggagaagcacatttatacttcggctgccgttcacctcatgaagactatctgtatcaagaagagcttgaaaacgcccaaagcgaaggcatcattacgcttcataccgctttttctcgcatgccaaatcagccgaaaacatacgttcagcacgtaatggaacaagacggcaagaaattgattgaacttcttgatcaaggagcgcacttctatatttgcggagacggaagccaaatggcacctgccgttgaagcaacgcttatgaaaagctatgctgacgttcaccaagtgagtgaagcagacgctcgcttatggctgcagcagctagaagaaaaaggccgatacgcaaaagacgtgtgggctggg

SEQ ID NO: 2 - protein, 1049 aa, synthetic construct
  REGION 1..1049: note = cytochrome P450 wild type
MTIKEMPQPKTFGELKNLPLLNTDKPVQALMRIADELGEIFKFEAPGSVTRFLSSQRLIKEACDESRFDKNLSQALKFARDFLGDGLFTSWTHEPNWKKAHNILLPSFSQRAMKRYHAMMVDIAVQLVQKWERLNADEHIEVSEDMTRLTLDTIGLCGFNYRFNSFYRDQPHPFIVSMVRALDEVMNKLQRANPDDPAYDENKRQCQEDIKVMNDYVDKIIADRKARGEQSHDLLTQMLNGKDPETGEPLDDGNISYQIITFLIAGHETTSGLLSFALYFLVKNPHVLQKVAEEAARVLVDPVPSYKQVKQLKYVGMVLNEALRLWPTAPAFSLYAKEDTVLGGEYPLTKGDEVMVLIPQLHRDKTIWGDDVEEFRPERFENPSAIPQHAFKPFGNGQRACIGQQFALHEATLVLGMMLKHFDFEDHTNYELDIKETLTLKPEGFVVKAKSKKIPLGGIPSPSTEQSAKKVRKKAENAHNTPLLVLYGSNAGTAEGTARDLADIAMSKGFAPQVATLDSHAGNLPREGAVLIVTASYNGHPPDNAKQFVDWLDQASADEVKGVRYSVFGCGDKNWAATYQKVPAFIDETLAAKGAENIADRGEADASDDFEGTYEEWRDHMWSDVAAYFNLDIENSEDNKSTLSLQFVDSAADMPLAKMHGAFSTNVVASKELQQPGSARSTRHLEIELPKEASYQEGDHLGVIPRNYEGIVNRVTARFGLSASQQIRLEAEEEKLAHLPLAKTVSVEELLQYVELQDPVTRTQLRAMAAKTVCPPHKVELEALLEKQAYKEQVLAKRLTMLELLEKYPACEMKFSEFIALLPSIRPRYYSISSSPRVDEKQASITVSVVSGEAWSGYGEYKGIASNYLAELQEGDTITCFISTPQSEFTLPKDPETPLIMVGPGTGVAPFRGFVQARKQLKEQGQSLGEAHLYFGCRSPHEDYLYQEELENAQSEGIITLHTAFSRMPNQPKTYVQHVMEQDGKKLIELLDQGAHFYICGDGSQMAPAVEATLMKSYADVHQVSEADARLWLQQLEEKGRYAKDVWAG

SEQ ID NO: 3 - DNA, 3147 bp, synthetic construct
  misc_feature 1..3147: note = Variant of cytochrome P450
  source 1..3147: mol_type = other DNA
atgacaataaaggaaatgccgcagccgaaaacgtttggagaacttaaaaatttaccgttattaaacacagataaaccggttcaagctttgatgcgtattgcggatgaattaggagaaatctttaaattcgaggcgcctggtagcgtaacgcgctttttatcaagtcagcgtctaattaaagaagcatgcgatgaatcacgctttgataaaaacttaagtcaagcgcttaaatttgcacgtgattttcttggagacgggttatttacaagctggacgcatgaaccgaattggaaaaaagcgcataatatcttaggcccaagctttagtcagcgtgcaatgaaacgttatcatgcgatgatggtcgatatcgccgtgcagcttgttcaaaagtgggagcgtctaaatgcagatgagcatattgaagtatcggaagacatgacacgtttaacgcttgatacaattggtctttgcggctttaactatcgctttaacagcttttaccgagatcagcctcatccatttattgtgagtatggtccgtgcactggatgaagtaatgaacaagctgcagcgagcaaatccagacgacccagcttatgatgaaaacaagcgccagtgtcaagaagatatcaaggtgatgaacgactatgtagataaaattattgcagatcgcaaagcaaggggtgaacaaagccatgatttattaacgcagatgctaaacggaaaagatccagaaacgggtgagccgcttgatgacgggaacattcgttatcaaattattacattcttaattgcgggacacgaaacaacaagtggtcttttatcatttgcgctgtatttcttagtgaaaaatccacatgtattacaaaaagtagcagaagaagcagcacgagttctagtagatcctgttccaagctacaaacaagtcaaacagcttaaatatgtcggcatggtcttaaacgaagcgctgcgcttatggccaactgctcctgcgttttccctatatgcaaaagaagatacggtgcttggaggagaatatcctttaaccaaaggcgacgaagtaatggttctgattcctcagcttcaccgtgataaaacaatttggggagacgatgtggaggagttccgtccagagcgttttgaaaatccaagtgcgattccgcagcatgcgtttaaaccgtttggaaacggtcagcgtgcgtgtatcggtcagcagttcgctcttcatgaagcaacgctggtacttggtatgatgctaaaacactttgactttgaagatcatacaaactacgagctcgatattaaagaaactttaacgttaaaacctgaaggctttgtggtaaaagcaaaatcgaaaaaaattccgcttggcggtattccttcacctagcactgaacagtctgctaaaaaagtacgcaaaaaggcagaaaacgctcataatacgccgctgcttgtgctatacggttcaaatgcgggaacagctgaaggaacggcgcgtgatttagcagatattgcaatgagcaaaggatttgcaccgcaggtcgcaacgcttgattcacacgccggaaatcttccgcgcgaaggagctgtattaattgtaacggcgtcttataacggtcatccgcctgataacgcaaagcaatttgtccgctggttagaccaagcgtctgctgatgaagtaaaaggcgttcgctactccgtatttggatgcggcgataaaaactgggctgcgacgtatcaaaaagtgcctgcttttatcgatgaaacgcttgccgctaaaggggcagaaaacatcgctgatcgcggtgaagcagatgcaagcgacgactttgaaggcacatatgaagaatggcgtgatcatatgtggagtgacgtagcagcctactttaacctcgacattgaaaacagtgaagataataaatctactctttcacttcaatttgtcgacagcgccgcggatatgccgcttgcgaaaatgcacggtgcgttttcaacgaacgtcgtagcaagcaaagaacttcaacagccaggcagtgcacgaagcacgcgacatcttgaaattgaacttccaaaagaagcttcttatcaagaaggagatcatttaggtgttattcctcgcaactatgaaggaatagtaaaccgtgtaacagcaaggttcggcctaagcgcatcacagcaaatccgtctggaagcagaagaagaaaaattagctcatttgccactcgctaaaacagtatccgtagaagagcttctgcaatacgtggagcttcaagatcctgttacgcgcacgcagcttcgcgcaatggctgctaaaacggtctgcccgccgcataaagtagagcttgaagccttgcttgaaaagcaagcctacaaagaacaagtgctggcaaaacgtttaacaatgcttgaactgcttgaaaaatacccggcgtgtgaaatgaaattcagcgaatttatcgcccttctgccaagcatccgcccgcgctattactcgatttcttcatcacctcgtgtcgatgaaaaacaagcaagcatcacggtcagcgttgtctcaggagaagcgtggagcggatatggagaatataaaggaattgcgtcgaactatcttgccgagctgcaagaaggagatacgattacgtgctttatttccacaccgcagtcagaatttacgctgccaaaagaccctgaaacgccgcttatcatggtcggaccgggaacaggcgtcgcgccgtttagaggctttgtgcaggcgcgcaaacagctaaaagaacaaggacagtcacttggagaagcacatttatacttcggctgccgttcacctcatgaagactatctgtatcaagaagagcttgaaaacgcccaaagcgaaggcatcattacgcttcataccgctttttctcgcatgccaaatcagccgaaaacatacgttcagcacgtaatggaacaagacggcaagaaattgattgaacttcttgatcaaggagcgcacttctatatttgcggagacggaagccaaatggcacctgccgttgaagcaacgcttatgaaaagctatgctgacgttcaccaagtgagtgaagcagacgctcgcttatggctgcagcagctagaagaaaaaggccgatacgcaaaagacgtgtgggctggg

SEQ ID NO: 4 - protein, 1049 aa, synthetic construct
  REGION 1..1049: note = Variant of cytochrome P450
MTIKEMPQPKTFGELKNLPLLNTDKPVQALMRIADELGEIFKFEAPGSVTRFLSSQRLIKEACDESRFDKNLSQALKFARDFLGDGLFTSWTHEPNWKKAHNILGPSFSQRAMKRYHAMMVDIAVQLVQKWERLNADEHIEVSEDMTRLTLDTIGLCGFNYRFNSFYRDQPHPFIVSMVRALDEVMNKLQRANPDDPAYDENKRQCQEDIKVMNDYVDKIIADRKARGEQSHDLLTQMLNGKDPETGEPLDDGNIRYQIITFLIAGHETTSGLLSFALYFLVKNPHVLQKVAEEAARVLVDPVPSYKQVKQLKYVGMVLNEALRLWPTAPAFSLYAKEDTVLGGEYPLTKGDEVMVLIPQLHRDKTIWGDDVEEFRPERFENPSAIPQHAFKPFGNGQRACIGQQFALHEATLVLGMMLKHFDFEDHTNYELDIKETLTLKPEGFVVKAKSKKIPLGGIPSPSTEQSAKKVRKKAENAHNTPLLVLYGSNAGTAEGTARDLADIAMSKGFAPQVATLDSHAGNLPREGAVLIVTASYNGHPPDNAKQFVRWLDQASADEVKGVRYSVFGCGDKNWAATYQKVPAFIDETLAAKGAENIADRGEADASDDFEGTYEEWRDHMWSDVAAYFNLDIENSEDNKSTLSLQFVDSAADMPLAKMHGAFSTNVVASKELQQPGSARSTRHLEIELPKEASYQEGDHLGVIPRNYEGIVNRVTARFGLSASQQIRLEAEEEKLAHLPLAKTVSVEELLQYVELQDPVTRTQLRAMAAKTVCPPHKVELEALLEKQAYKEQVLAKRLTMLELLEKYPACEMKFSEFIALLPSIRPRYYSISSSPRVDEKQASITVSVVSGEAWSGYGEYKGIASNYLAELQEGDTITCFISTPQSEFTLPKDPETPLIMVGPGTGVAPFRGFVQARKQLKEQGQSLGEAHLYFGCRSPHEDYLYQEELENAQSEGIITLHTAFSRMPNQPKTYVQHVMEQDGKKLIELLDQGAHFYICGDGSQMAPAVEATLMKSYADVHQVSEADARLWLQQLEEKGRYAKDVWAG

SEQ ID NO: 5 - DNA, 3147 bp, synthetic construct
  misc_feature 1..3147: note = Variant of cytochrome P450
  source 1..3147: mol_type = other DNA
atgacaataaaggaaatgccgcagccgaaaacgtttggagaacttaaaaatttaccgttattaaacacagataaaccggttcaagctttgatgcgtattgcggatgaattaggagaaatctttaaattcgaggcgcctggtagcgtaacgcgctttttatcaagtcagcgtctaattaaagaagcatgcgatgaatcacgctttgataaaaacttaagtcaagcgcttaaatttgcacgtgattttcttggagacgggttatttacaagctggacgcatgaaccgaattggaaaaaagcgcataatatcttactgccaagctttagtcagcgtgcaatgaaacgttatcatgcgatgatggtcgatatcgccgtgcagcttgttcaaaagtgggagcgtctaaatgcagatgagcatattgaagtatcggaagacatgacacgtttaacgcttgatacaattggtctttgcggctttaactatcgctttaacagcttttaccgagatcagcctcatccatttattgtgagtatggtccgtgcactggatgaagtaatgaacaagctgcagcgagcaaatccagacgacccagcttatgatgaaaacaagcgccagtgtcaagaagatatcaaggtgatgaacgactatgtagataaaattattgcagatcgcaaagcaaggggtgaacaaagccatgatttattaacgcagatgctaaacggaaaagatccagaaacgggtgagccgcttgatgacgggaacattcgttatcaaattattacattcttaattgcgggacacgaaacaacaagtggtcttttatcatttgcgctgtatttcttagtgaaaaatccacatgtattacaaaaagtagcagaagaagcagcacgagttctagtagatcctgttccaagctacaaacaagtcaaacagcttaaatatgtcggcatggtcttaaacgaagcgctgcgcttatggccaactgctcctgcgttttccctatatgcaaaagaagatacggtgcttggaggagaatatcctttaaccaaaggcgacgaagtaatggttctgattcctcagcttcaccgtgataaaacaatttggggagacgatgtggaggagttccgtccagagcgttttgaaaatccaagtgcgattccgcagcatgcgtttaaaccgtttggaaacggtcagcgtgcgtgtatcggtcagcagttcgctcttcatgaagcaacgctggtacttggtatgatgctaaaacactttgactttgaagatcatacaaactacgagctcgatattaaagaaactttaacgttaaaacctgaaggctttgtggtaaaagcaaaatcgaaaaaaattccgcttggcggtattccttcacctagcactgaacagtctgctaaaaaagtacgcaaaaaggcagaaaacgctcataatacgccgctgcttgtgctatacggttcaaatgcgggaacagctgaaggaacggcgcgtgatttagcagatattgcaatgagcaaaggatttgcaccgcaggtcgcaacgcttgattcacacgccggaaatcttccgcgcgaaggagctgtattaattgtaacggcgtcttataacggtcatccgcctgataacgcaaagcaatttgtcgactggttagaccaagcgtctgctgatgaagtaaaaggcgttcgctactccgtatttggatgcggcgataaaaactgggctgcgacgtatcaaaaagtgcctgcttttatcgatgaaacgcttgccgctaaaggggcagaaaacatcgctgaccgcggtgaagcagatgcaagcgacgactttgaaggcacatatgaagaatggcgtgatcatatgtggagcgacgtagcagcctactttaacctcgacattgaaaacagtgaagataataaatctactctttcacttcaatttgtcgacagcgccgcggatatgccgcttgcgaaaatgcacggtgcgttttcaacgaacgtcgtagcaagcaaagaacttcaacagccaggcagtgcacgaagcacgcgacatcttgaaattgaacttccaaaagaagcttcttatcaagaaggagatcatttaggtgttattcctcgcaactatgaaggaatagtaaaccgtgtaacagcaaggttcggcctaagcgcatcacagcaaatccgtctggaagcagaagaagaaaaattagctcatttgccactcgctaaaacagtatccgtagaggagcttctgcaatacgtggagcttcaagatcctgttacgcgcacgcagcttcgcgcaatggctgctaaaacggtctgcccgccgcataaagtagagcttgaagccttgcttgaaaagcaagcctacaaagaacaagtgctggcaaaacgtttaacaatgcttgaactgcttgaaaaatacccggcgtgtgaaatgaaattcagcgaatttatcgcccttctgccaagcatacgcccgcgctattactcgatttcttcatcacctcgtgtcgatgaaaaacaagcaagcatcacggtcagcgttgtctcaggagaagcgtggagcggatatggagaatataaaggaattgcgtcgaactatcttgccgagctgcaagaaggagatacgattacgtgctttatttccacaccgcagtcagaatttacgctgccaaaagaccctgaaacgccgcttatcatggtcggaccgggaacaggcgtcgcgccgtttagaggctttgtgcaggcgcgcaaacagctaaaagaacaaggacagtcacttggagaagcacatttatacttcggctgccgttcacctcatgaagactatctgtatcaagaagagcttgaaaacgcccaaagcgaaggcatcattacgcttcataccgctttttctcgcatgccaaatcagccgaaaacatacgttcagcacgtaatggaacaagacggcaagaaattgattgaacttcttgatcaaggagcgcacttctatatttgcggagacggaagccaaatggcacctgccgttgaagcaacgcttatgaaaagctatgctgacgttcaccaagtgagtgaagcagacgctcgcttatggctgcagcagctagaagaaaaaggccgatacgcaaaagacgtgtgggctggg

SEQ ID NO: 6 - protein, 1049 aa, synthetic construct
  REGION 1..1049: note = Variant of cytochrome P450
MTIKEMPQPKTFGELKNLPLLNTDKPVQALMRIADELGEIFKFEAPGSVTRFLSSQRLIKEACDESRFDKNLSQALKFARDFLGDGLFTSWTHEPNWKKAHNILLPSFSQRAMKRYHAMMVDIAVQLVQKWERLNADEHIEVSEDMTRLTLDTIGLCGFNYRFNSFYRDQPHPFIVSMVRALDEVMNKLQRANPDDPAYDENKRQCQEDIKVMNDYVDKIIADRKARGEQSHDLLTQMLNGKDPETGEPLDDGNIRYQIITFLIAGHETTSGLLSFALYFLVKNPHVLQKVAEEAARVLVDPVPSYKQVKQLKYVGMVLNEALRLWPTAPAFSLYAKEDTVLGGEYPLTKGDEVMVLIPQLHRDKTIWGDDVEEFRPERFENPSAIPQHAFKPFGNGQRACIGQQFALHEATLVLGMMLKHFDFEDHTNYELDIKETLTLKPEGFVVKAKSKKIPLGGIPSPSTEQSAKKVRKKAENAHNTPLLVLYGSNAGTAEGTARDLADIAMSKGFAPQVATLDSHAGNLPREGAVLIVTASYNGHPPDNAKQFVDWLDQASADEVKGVRYSVFGCGDKNWAATYQKVPAFIDETLAAKGAENIADRGEADASDDFEGTYEEWRDHMWSDVAAYFNLDIENSEDNKSTLSLQFVDSAADMPLAKMHGAFSTNVVASKELQQPGSARSTRHLEIELPKEASYQEGDHLGVIPRNYEGIVNRVTARFGLSASQQIRLEAEEEKLAHLPLAKTVSVEELLQYVELQDPVTRTQLRAMAAKTVCPPHKVELEALLEKQAYKEQVLAKRLTMLELLEKYPACEMKFSEFIALLPSIRPRYYSISSSPRVDEKQASITVSVVSGEAWSGYGEYKGIASNYLAELQEGDTITCFISTPQSEFTLPKDPETPLIMVGPGTGVAPFRGFVQARKQLKEQGQSLGEAHLYFGCRSPHEDYLYQEELENAQSEGIITLHTAFSRMPNQPKTYVQHVMEQDGKKLIELLDQGAHFYICGDGSQMAPAVEATLMKSYADVHQVSEADARLWLQQLEEKGRYAKDVWAG

SEQ ID NO: 7 - DNA, 3147 bp, synthetic construct
  misc_feature 1..3147: note = Variant of cytochrome P450
  source 1..3147: mol_type = other DNA
atgacaataaaggaaatgccgcagccgaaaacgtttggagaacttaaaaatttaccgttattaaacacagataaaccggttcaagctttgatgcgtattgcggatgaattaggagaaatctttaaattcgaggcgcctggtagcgtaacgcgctttttatcaagtcagcgtctaattaaagaagcatgcgatgaatcacgctttgataaaaacttaagtcaagcgcttaaatttgcacgtgattttcttggagacgggttatttacaagctggacgcatgaaccgaattggaaaaaagcgcataatatcttacttccaagctttagtcagcgtgcaatgaaacgttatcatgcgatgatggtcgatatcgccgtgcagcttgttcaaaagtgggagcgtctaaatgcagatgagcatattgaagtatcggaagacatgacacgtttaacgcttgatacaattggtctttgcggctttaactatcgctttaacagcttttaccgagatcagcctcatccatttattgtgagtatggtccgtgcactggatgaagtaatgaacaagctgcagcgagcaaatccagacgacccagcttatgatgaaaacaagcgccagtgtcaagaagatatcaaggtgatgaacgactatgtagataaaattattgcagatcgcaaagcaaggggtgaacaaagccatgatttattaacgcagatgctaaacggaaaagatccagaaacgggtgagccgcttgatgacgggaacattagctatcaaattattacattcttaattgcgggacacgaaacaacaagtggtcttttatcatttgcgctgtatttcttagtgaaaaatccacatgtattacaaaaagtagcagaagaagcagcacgagttctagtagatcctgttccaagctacaaacaagtcaaacagcttaaatatgtcggcatggtcttaaacgaagcgctgcgcttatggccaactgctcctgcgttttccctatatgcaaaagaagatacggtgcttggaggagaatatcctttaaccaaaggcgacgaagtaatggttctgattcctcagcttcaccgtgataaaacaatttggggagacgatgtggaggagttccgtccagagcgttttgaaaatccaagtgcgattccgcagcatgcgtttaaaccgtttggaaacggtcagcgtgcgtgtatcggtcagcagttcgctcttcatgaagcaacgctggtacttggtatgatgctaaaacactttgactttgaagatcatacaaactacgagctcgatattaaagaaaagttaacgttaaaacctgaaggctttgtggtaaaagcaaaatcgaaaaaaattccgcttggcggtattccttcacctagcactgaacagtctgctaaaaaagtacgcaaaaaggcagaaaacgctcataatacgccgctgcttgtgctatacggttcaaatgcgggaacagctgaaggaacggcgcgtgatttagcagatattgcaatgagcaaaggatttgcaccgcaggtcgcaacgcttgattcacacgccggaaatcttccgcgcgaaggagctgtattaattgtaacggcgtcttataacggtcatccgcctgataacgcaaagcaatttgtcgactggttagaccaagcgtctgctgatgaagtaaaaggcgttcgctactccgtatttggatgcggcgataaaaactgggctgcgacgtatcaaaaagtgcctgcttttatcgatgaaacgcttgccgctaaaggggcagaaaacatcgctgaccgcggtgaagcagatgcaagcgacgactttgaaggcacatatgaagaatggcgtgatcatatgtggagtgacgtagcagcctactttaacctcgacattgaaaacagtgaagataataaatctactctttcacttcaatttgtcgacagcgccgcggatatgccgcttgcgaaaatgcacggtgcgttttcaacgaacgtcgtagcaagcaaagaacttcaacagccaggcagtgcacgaagcacgcgacatcttgaaattgaacttccaaaagaagcttcttatcaagaaggagatcatttaggtgttattcctcgcaactatgaaggaatagtaaaccgtgtaacagcaaggttcggcctaagcgcatcacagcaaatccgtctggaagcagaagaagaaaaattagctcatttgccactcgctaaaacagtatccgtagaagagcttctgcaatacgtggagcttcaagatcctgttacgcgcacgcagcttcgcgcaatggctgctaaaacggtctgcccgccgcataaagtagagcttgaagccttgcttgaaaagcaagcctacaaagaacaagtgctggcaaaacgtttaacaatgcttgaactgcttgaaaaatacccggcgtgtgaaatgaaattcagcgaatttatcgcccttctgccaagcatacgcccgcgctattactcgatttcttcatcacctcgtgtcgatgaaaaacaagcaagcatcacggtcagcgttgtctcaggagaagcgtggagcggatatggagaatataaaggaattgcgtcgaactatcttgccgagctgcaagaaggagatacgattacgtgctttatttccacaccgcagtcagaatttacgctgccaaaagaccctgaaacgccgcttatcatggtcggaccgggaacaggcgtcgcgccgtttagaggctttgtgcaggcgcgcaaacagctaaaagaacaaggacagtcacttggagaagcacatttatacttcggctgccgttcacctcatgaagactatctgtatcaagaagagcttgaaaacgcccaaagcgaaggcatcattacgcttcataccgctttttctcgcatgccaaatcagccgaaaacatacgttcagcacgtaatggaacaagacggcaagaaattgattgaacttcttgatcaaggagcgcacttctatatttgcggagacggaagccaaatggcacctgccgttgaagcaacgcttatgaaaagctatgctgacgttcaccaagtgagtgaagcagacgctcgcttatggctgcagcagctagaagaaaaaggccgatacgcaaaagacgtgtgggctggg

SEQ ID NO: 8 - protein, 1049 aa, synthetic construct
  REGION 1..1049: note = Variant of cytochrome P450
MTIKEMPQPKTFGELKNLPLLNTDKPVQALMRIADELGEIFKFEAPGSVTRFLSSQRLIKEACDESRFDKNLSQALKFARDFLGDGLFTSWTHEPNWKKAHNILLPSFSQRAMKRYHAMMVDIAVQLVQKWERLNADEHIEVSEDMTRLTLDTIGLCGFNYRFNSFYRDQPHPFIVSMVRALDEVMNKLQRANPDDPAYDENKRQCQEDIKVMNDYVDKIIADRKARGEQSHDLLTQMLNGKDPETGEPLDDGNISYQIITFLIAGHETTSGLLSFALYFLVKNPHVLQKVAEEAARVLVDPVPSYKQVKQLKYVGMVLNEALRLWPTAPAFSLYAKEDTVLGGEYPLTKGDEVMVLIPQLHRDKTIWGDDVEEFRPERFENPSAIPQHAFKPFGNGQRACIGQQFALHEATLVLGMMLKHFDFEDHTNYELDIKEKLTLKPEGFVVKAKSKKIPLGGIPSPSTEQSAKKVRKKAENAHNTPLLVLYGSNAGTAEGTARDLADIAMSKGFAPQVATLDSHAGNLPREGAVLIVTASYNGHPPDNAKQFVDWLDQASADEVKGVRYSVFGCGDKNWAATYQKVPAFIDETLAAKGAENIADRGEADASDDFEGTYEEWRDHMWSDVAAYFNLDIENSEDNKSTLSLQFVDSAADMPLAKMHGAFSTNVVASKELQQPGSARSTRHLEIELPKEASYQEGDHLGVIPRNYEGIVNRVTARFGLSASQQIRLEAEEEKLAHLPLAKTVSVEELLQYVELQDPVTRTQLRAMAAKTVCPPHKVELEALLEKQAYKEQVLAKRLTMLELLEKYPACEMKFSEFIALLPSIRPRYYSISSSPRVDEKQASITVSVVSGEAWSGYGEYKGIASNYLAELQEGDTITCFISTPQSEFTLPKDPETPLIMVGPGTGVAPFRGFVQARKQLKEQGQSLGEAHLYFGCRSPHEDYLYQEELENAQSEGIITLHTAFSRMPNQPKTYVQHVMEQDGKKLIELLDQGAHFYICGDGSQMAPAVEATLMKSYADVHQVSEADARLWLQQLEEKGRYAKDVWAG

SEQ ID NO: 9 - DNA, 3147 bp, synthetic construct
  misc_feature 1..3147: note = Variant of cytochrome P450
  source 1..3147: mol_type = other DNA
atgacaataaaggaaatgccgcagccgaaaacgtttggagaacttaaaaatttaccgttattaaacacagataaaccggttcaagctttgatgcgtattgcggatgaattaggagaaatctttaaattcgaggcgcctggtagcgtaacgcgctttttatcaagtcagcgtctaattaaagaagcatgcgatgaatcacgctttgataaaaacttaagtcaagcgcttaaatttgcacgtgattttcttggagacgggttatttacaagctggacgcatgaaccgaattggaaaaaagcgcataatatcttacttccaagctttagtcagcgtgcaatgaaacgttatcatgcgatgatggtcgatatcgccgtgcagcttgttcaaaagtgggagcgtctaaatgcagatgagcatattgaagtatcggaagacatgacacgtttaacgcttgatacaattggtctttgcggctttaactatcgctttaacagcttttaccgagatcagcctcatccatttattgtgagtatggtccgtgcactggatgaagtaggtaacaagctgcagcgagcaaatccagacgacccagcttatgatgaaaacaagcgccagtgtcaagaagatatcaaggtgatgaacgactatgtagataaaattattgcagatcgcaaagcaaggggtgaacaaagccatgatttattaacgcagatgctaaacggaaaagatccagaaacgggtgagccgcttgatgacgggaacattagctatcaaattattacattcttaattgcgggacacgaaacaacaagtggtcttttatcatttgcgctgtatttcttagtgaaaaatccacatgtattacaaaaagtagcagaagaagcagcacgagttctagtagatcctgttccaagctacaaacaagtcaaacagcttaaatatgtcggcatggtcttaaacgaagcgctgcgcttatggccaactgctcctgcgttttccctatatgcaaaagaagatacggtgcttggaggagaatatcctttaaccaaaggcgacgaagtaatggttctgattcctcagcttcaccgtgataaaacaatttggggagacgatgtggaggagttccgtccagagcgttttgaaaatccaagtgcgattccgcagcatgcgtttaaaccgtttggaaacggtcagcgtgcgtgtatcggtcagcagttcgctcttcatgaagcaacgctggtacttggtatgatgctaaaacactttgactttgaagatcatacaaactacgagctcgatattaaagaaactttaacgttaaaacctgaaggctttgtggtaaaagcaaaatcgaaaaaaattccgcttggcggtattccttcacctagcactgaacagtctgctaaaaaagtacgcaaaaaggcagaaaacgctcataatacgccgctgcttgtgctatacggttcaaatgcgggaacagctgaaggaacggcgcgtgatttagcagatattgcaatgagcaaaggatttgcaccgcaggtcgcaacgcttgattcacacgccggaaatcttccgcgcgaaggagctgtattaattgtaacggcgtcttataacggtcatccgcctgataacgcaaagcaatttgtcgactggttagaccaagcgtctgctgatgaagtaaaaggcgttcgctactccgtatttggatgcggcgataaaaactgggctgcgacgtatcaaaaagtgcctgcttttatcgatgaaacgcttgccgctaaaggggcagaaaacatcgctgaccgcggtgaagcagatgcaagcgacgactttgaaggcacatatgaagaatggcgtgatcatatgtggagtgacgtagcagcctactttaacctcgacattgaaaacagtgaagataataaatctactctttcacttcaatttgtcgacagcgccgcggatatgccgcttgcgaaaatgcacggtgcgttttcaacgaacgtcgtagcaagcaaagaacttcaacagccaggcagtgcacgaagcacgcgacatcttgaaattgaacttccaaaagaagcttcttatcaagaaggagatcatttaggtgttattcctcgcaactatgaaggaatagtaaaccgtgtaacagcaaggttcggcctaagcgcatcacagcaaatccgtctggaagcagaagaagaaaaattagctcatttgccactcgctaaaacagtatccgtagaagagcttctgcaatacgtggagcttcaagatcctgttacgcgcacgcagcttcgcgcaatggctgctaaaacggtctgcccgccgcataaagtagagcttgaagccttgcttgaaaagcaagcctacaaagaacaagtgctggcaaaacgtttaacaatgcttgaactgcttgaaaaatacccggcgtgtgaaatgaaattcagcgaatttatcgcccttctgccaagcatacgcccgcgctattactcgatttcttcatcacctcgtgtcgatgaaaaacaagcaagcatcacggtcagcgttgtctcaggagaagcgtggagcggatatggagaatataaaggaattgcgtcgaactatcttgccgagctgcaagaaggagatacgattacgtgctttatttccacaccgcagtcagaatttacgctgccaaaagaccctgaaacgccgcttatcatggtcggaccgggaacaggcgtcgcgccgtttagaggctttgtgcaggcgcgcaaacagctaaaagaacaaggacagtcacttggagaagcacatttatacttcggctgccgttcacctcatgaagactatctgtatcaagaagagcttgaaaacgcccaaagcgaaggcatcattacgcttcataccgctttttctcgcatgccaaatcagccgaaaacatacgttcagcacgtaatggaacaagacggcaagaaattgattgaacttcttgatcaaggagcgcacttctatatttgcggagacggaagccaaatggcacctgccgttgaagcaacgcttatgaaaagctatgctgacgttcaccaagtgagtgaagcagacgctcgcttatggctgcagcagctagaagaaaaaggccgatacgcaaaagacgtgtgggctggg

SEQ ID NO: 10 - protein, 1049 aa, synthetic construct
  REGION 1..1049: note = Variant of cytochrome P450
MTIKEMPQPKTFGELKNLPLLNTDKPVQALMRIADELGEIFKFEAPGSVTRFLSSQRLIKEACDESRFDKNLSQALKFARDFLGDGLFTSWTHEPNWKKAHNILLPSFSQRAMKRYHAMMVDIAVQLVQKWERLNADEHIEVSEDMTRLTLDTIGLCGFNYRFNSFYRDQPHPFIVSMVRALDEVGNKLQRANPDDPAYDENKRQCQEDIKVMNDYVDKIIADRKARGEQSHDLLTQMLNGKDPETGEPLDDGNISYQIITFLIAGHETTSGLLSFALYFLVKNPHVLQKVAEEAARVLVDPVPSYKQVKQLKYVGMVLNEALRLWPTAPAFSLYAKEDTVLGGEYPLTKGDEVMVLIPQLHRDKTIWGDDVEEFRPERFENPSAIPQHAFKPFGNGQRACIGQQFALHEATLVLGMMLKHFDFEDHTNYELDIKETLTLKPEGFVVKAKSKKIPLGGIPSPSTEQSAKKVRKKAENAHNTPLLVLYGSNAGTAEGTARDLADIAMSKGFAPQVATLDSHAGNLPREGAVLIVTASYNGHPPDNAKQFVDWLDQASADEVKGVRYSVFGCGDKNWAATYQKVPAFIDETLAAKGAENIADRGEADASDDFEGTYEEWRDHMWSDVAAYFNLDIENSEDNKSTLSLQFVDSAADMPLAKMHGAFSTNVVASKELQQPGSARSTRHLEIELPKEASYQEGDHLGVIPRNYEGIVNRVTARFGLSASQQIRLEAEEEKLAHLPLAKTVSVEELLQYVELQDPVTRTQLRAMAAKTVCPPHKVELEALLEKQAYKEQVLAKRLTMLELLEKYPACEMKFSEFIALLPSIRPRYYSISSSPRVDEKQASITVSVVSGEAWSGYGEYKGIASNYLAELQEGDTITCFISTPQSEFTLPKDPETPLIMVGPGTGVAPFRGFVQARKQLKEQGQSLGEAHLYFGCRSPHEDYLYQEELENAQSEGIITLHTAFSRMPNQPKTYVQHVMEQDGKKLIELLDQGAHFYICGDGSQMAPAVEATLMKSYADVHQVSEADARLWLQQLEEKGRYAKDVWAG

SEQ ID NO: 11 - DNA, 3147 bp, synthetic construct
  misc_feature 1..3147: note = Variant of cytochrome P450
  source 1..3147: mol_type = other DNA
atgacaataaaggaaatgccgcagccgaaaacgtttggagaacttaaaaatttaccgttattaaacacagataaaccggttcaagctttgatgcgtattgcggatgaattaggagaaatctttaaattcgaggcgcctggtagcgtaacgcgctttttatcaagtcagcgtctaattaaagaagcatgcgatgaatcacgctttgataaaaacttaagtcaagcgcttaaatttgcacgtgattttcttggagacgggttatttacaagctggacgcatgaaccgaattggaaaaaagcgcataatatcttacttccaagctttagtcagcgtgcaatgaaacgttatcatgcgatgatggtcgatatcgccgtgcagcttgttcaaaagtgggagcgtctaaatgcagatgagcatattgaagtatcggaagacatgacacgtttaacgcttgatacaattggtctttgcggctttaactatcgctttaacagcttttaccgagatcagcctcatccatttattgtgagtatggtccgtgcactggatgaagtaatgaacaagctgcagcgagcaaatccagacgacccagcttatgatgaaaacaagcgccagtgtcaagaagatatcaaggtgatgaacgactatgtagataaaattattgcagatcgcaaagcaaggggtgaacaaagccatgatttattaacgcagatgctaaacggaaaagatccagaaacgggtgagccgcttgatgacgggaacattcgttatcaaattattacattcttaattgcgggacacgaaacaacaagtggtcttttatcatttgcgctgtatttcttagtgaaaaatccacatgtattacaaaaagtagcagaagaagcagcacgagttctagtagatcctgttccaagctacaaacaagtcaaacagcttaaatatgtcggcatggtcttaaacgaagcgctgcgcttatggccaactgctcctgcgttttccctatatgcaaaagaagatacggtgcttggaggagaatatcctttaacgaaaggcgacgaagtaatggttctgattcctcagcttcaccgtgataaaacaatttggggagacgatgtggaggagttccgtccagagcgttttgaaaatccaagtgcgattccgcagcatgcgtttaaaccgtttggaaacggtcagcgtgcgtgtatcggtcagcagttcgctcttcatgaagcaacgctggtacttggtatgatgctaaaacactttgactttgaagatcatacaaactacgagctcgatattaaagaaactttaacgttaaaacctgaaggctttgtggtaaaagcaaaatcgaaaaagattccgcttggcggtattccttcacctagcactgaacagtctgctaaaaaagtacgcaaaaaggcagaaaacgctcataatacgccgctgcttgtgctatacggttcaaatgcgggaacagctgaaggaacggcgcgtgatttagcagatattgcaatgagcaaaggatttgcaccgcaggtcgcaacgcttgattcacacgccggaaatcttccgcgcgaaggagctgtattaattgtaacggcgtcttataacggtcatccgcctgataacgcaaagcaatttgtcgactggttagaccaagcgtctgctgatgaagtaaaaggcgttcgctactccgtatttggatgcggcgataaaaactgggctgcgacgtatcaaaaagtgcctgcttttatcgatgaaacgcttgccgctaaaggggcagaaaacatcgctgaccgcggtgaagcagatgcaagcgacgactttgaaggcacatatgaagaatggcgtgatcatatgtggagtgacgtagcagcctactttaacctcgacattgaaaacagtgaagataataaatctactctttcacttcaatttgtcgacagcgccgcggatatgccgcttgcgaaaatgcacggtgcgttttcaacgaacgtcgtagcaagcaaagaacttcaacagccaggcagtgcacgaagcacgcgacatcttgaaattgaacttccaaaagaagcttcttatcaagaaggagatcatttaggtgttattcctcgcaactatgaaggaatagtaaaccgtgtaacagcaaggttcggcctaagcgcatcacagcaaatccgtctggaagcagaagaagaaaaattagctcatttgccactcgctaaaacagtatccgtactggagcttctgcaatacgtggagcttcaagatcctgttacgcgcacgcagcttcgcgcaatggctgctaaaacggtctgcccgccgcataaagtagagcttgaagccttgcttgaaaagcaagcctacaaagaacaagtgctggcaaaacgtttaacaatgcttgaactgcttgaaaaatacccggcgtgtgaaatgaaattcagcgaatttatcgcccttctgccaagcatacgcccgcgctattactcgatttcttcatcacctcgtgtcgatgaaaaacaagcaagcatcacggtcagcgttgtctcaggaccggcgtggagcggatatggagaatataaaggaattgcgtcgaactatcttgccgagctgcaagaaggagatacgattacgtgctttatttccacaccgcagtcagaatttacgctgccaaaagaccctgaaacgccgcttatcatggtcggaccgggaacaggcgtcgcgccgtttagaggctttgtgcaggcgcgcaaacagctaaaagaacaaggacagtcacttggagaagcacatttatacttcggctgccgttcacctcatgaagactatctgtatcaagaagagcttgaaaacgcccaaagcgaaggcatcattacgcttcataccgctttttctcgcatgccaaatcagccgaaaacatacgttcagcacgtaatggaacaagacggcaagaaattgattgaacttcttgatcaaggagcgcacttctatatttgcggagacggaagccaaatggcacctgccgttgaagcaacgcttatgaaaagctatgctgacgttcaccaagtgagtgaagcagacgctcgcttatggctgcagcagctagaagaaaaaggccgatacgcaaaagacgtgtgggctggg

SEQ ID NO: 12 - protein, 1049 aa, synthetic construct
  REGION 1..1049: note = Variant of cytochrome P450
MTIKEMPQPKTFGELKNLPLLNTDKPVQALMRIADELGEIFKFEAPGSVTRFLSSQRLIKEACDESRFDKNLSQALKFARDFLGDGLFTSWTHEPNWKKAHNILLPSFSQRAMKRYHAMMVDIAVQLVQKWERLNADEHIEVSEDMTRLTLDTIGLCGFNYRFNSFYRDQPHPFIVSMVRALDEVMNKLQRANPDDPAYDENKRQCQEDIKVMNDYVDKIIADRKARGEQSHDLLTQMLNGKDPETGEPLDDGNIRYQIITFLIAGHETTSGLLSFALYFLVKNPHVLQKVAEEAARVLVDPVPSYKQVKQLKYVGMVLNEALRLWPTAPAFSLYAKEDTVLGGEYPLTKGDEVMVLIPQLHRDKTIWGDDVEEFRPERFENPSAIPQHAFKPFGNGQRACIGQQFALHEATLVLGMMLKHFDFEDHTNYELDIKETLTLKPEGFVVKAKSKKIPLGGIPSPSTEQSAKKVRKKAENAHNTPLLVLYGSNAGTAEGTARDLADIAMSKGFAPQVATLDSHAGNLPREGAVLIVTASYNGHPPDNAKQFVDWLDQASADEVKGVRYSVFGCGDKNWAATYQKVPAFIDETLAAKGAENIADRGEADASDDFEGTYEEWRDHMWSDVAAYFNLDIENSEDNKSTLSLQFVDSAADMPLAKMHGAFSTNVVASKELQQPGSARSTRHLEIELPKEASYQEGDHLGVIPRNYEGIVNRVTARFGLSASQQIRLEAEEEKLAHLPLAKTVSVLELLQYVELQDPVTRTQLRAMAAKTVCPPHKVELEALLEKQAYKEQVLAKRLTMLELLEKYPACEMKFSEFIALLPSIRPRYYSISSSPRVDEKQASITVSVVSGPAWSGYGEYKGIASNYLAELQEGDTITCFISTPQSEFTLPKDPETPLIMVGPGTGVAPFRGFVQARKQLKEQGQSLGEAHLYFGCRSPHEDYLYQEELENAQSEGIITLHTAFSRMPNQPKTYVQHVMEQDGKKLIELLDQGAHFYICGDGSQMAPAVEATLMKSYADVHQVSEADARLWLQQLEEKGRYAKDVWAG

SEQ ID NO: 13 - DNA, 3147 bp, synthetic construct
  misc_feature 1..3147: note = Variant of cytochrome P450
  source 1..3147: mol_type = other DNA
atgacaataaaggaaatgccgcagccgaaaacgtttggagaacttaaaaatttaccgttattaaacacagataaaccggttcaagctttgatgcgtattgcggatgaattaggagaaatctttaaattcgaggcgcctggtagcgtaacgcgctttttatcaagtcagcgtctaattaaagaagcatgcgatgaatcacgctttgataaaaacttaagtcaagcgcttaaatttgcacgtgattttcttggagacgggttatttacaagctggacgcatgaaccgaattggaaaaaagcgcataatatcttacttccaagctttagtcagcgtgcaatgaaacgttatcatgcgatgatggtcgatatcgccgtgcagcttgttcaaaagtgggagcgtctaaatgcagatgagcatattgaagtatcggaagacatgacacgtttaacgcttgatacaattggtctttgcggctttaactatcgctttaacagcttttaccgagatcagcctcatccatttattgtgagtatggtccgtgcactggatgaagtaatgaacaagctgcagcgagcaaatccagacgacccagcttatgatgaaaacaagcgccagtgtcaagaagatatcaaggtgatgaacgactatgtagataaaattattgcagatcgcaaagcaaggggtgaacaaagccatgatttattaacgcagatgctaaacggaaaagatccagaaacgggtgagccgcttgatgacgggaacattagctatcaaattattacattcttaattgcgggacacgaaacaacaagtggtcttttatcatttgcgctgtatttcttagtgaaaaatccacatgtattacaaaaagtagcagaagaagcagcacgagttctagtagatcctgttccaagctacaaacaagtcaaacagcttaaatatgtcggcatggtcttaaacgaagcgctgcgcttatggccaactgctggggcgttttccctatatgcaaaagaagatacggtgcttggaggagaatatcctttaaccaaaggcgacgaagtaatggttctgattcctcagcttcaccgtgataaaacaatttggggagacgatgtggaggagttccgtccagagcgttttgaaaatccaagtgcgattccgcagcatgcgtttaaaccgtttggaaacggtcagcgtgcgtgtatcggtcagcagttcgctcttcatgaagcaacgctggtacttggtatgatgctaaaacactttgactttgaagatcatacaaactacgagctcgatattaaagaaactttaacgttaaaacctgaaggctttgtggtaaaagcaaaatcgaaaaaaattccgcttggcggtattccttcacctagcactgaacagtctgctaaaaaagtacgcaaaaaggcagaaaacgctcataatacgccgctgcttgtgctatacggttcaaatgcgggaacagctgaaggaacggcgcgtgatttagcagatattgcaatgagcaaaggatttgcaccgcaggtcgcaacgcttgattcacacgccggaaatcttccgcgcgaaggagctgtattaattgtaacggcgtcttataacggtcatccgcctgataacgcaaagcaatttgtcgactggttagaccaagcgtctgctgatgaagtaaaaggcgttcgctactccgtatttggatgcggcgataaaaactgggctgcgacgtatcaaaaagtgcctgcttttatcgatgaaacgcttgccgctaaaggggcagaaaacatcgctgaccgcggtgaagcagatgcaagcgacgactttgaaggcacatatgaagaatggcgtgatcatatgtggagtgacgtagcagcctactttaacctcgacattgaaaacagtgaagataataaatctactctttcacttcaatttgtcgacagcgccgcggatatgccgcttgcgaaaatgcacggtgcgttttcaacgaacgtcgtagcaagcaaagaacttcaacagccaggcagtgcacgaagcacgcgacatcttgaaattgaacttccaaaagaagcttcttatcaagaaggagatcatttaggtgttattcctcgcaactatgaaggaatagtaaaccgtgtaacagcaaggttcggcctaagcgcatcacagcaaatccgtctggaagcagaagaagaaaaattagctcatttgccactcgctaaaacagtatccgtagaagagcttctgcaatacgtggagcttcaagatcctgttacgcgcacgcagcttcgcgcaatggctgctaaaacggtctgcccgccgcataaagtagagcttgaagccttgcttgaaaagcaagcctacaaagaacaagtgctggcaaaacgtttaacaatgcttgaactgcttgaaaaatacccggcgtgtgaaatgaaattcagcgaatttatcgcccttctgccaagcatacgcccgcgctattactcgatttcttcatcacctcgtgtcgatgaaaaacaagcaagcatcacggtcagcgttgtctcaggagaagcgtggagcggatatggagaatataaaggaattgcgtcgaactatcttgccgagctgcaagaaggagatacgattacgtgctttatttccacaccgcagtcagaatttacgctgccaaaagaccctgaaacgccgcttatcatggtcggaccgggaacaggcgtcgcgccgtttagaggctttgtgcaggcgcgcaaacagctaaaagaacaaggacagtcacttggagaagcacatttatacttcggctgccgttcacctcatgaagactatctgtatcaagaagagcttgaaaacgcccaaagcgaaggcatcattacgcttcataccgctttttctcgcatgccaaatcagccgaaaacatacgttcagcacgtaatggaacaagacggcaagaaattgattgaacttcttgatcaaggagcgcacttctatatttgcggagacggaagccaaatggcacctgccgttgaagcaacgcttatgaaaagctatgctgacgttcaccaagtgagtgaagcagacgctcgcttatggctgcagcagctagaagaaaaaggccgatacgcaaaagacgtgtgggctggg

SEQ ID NO: 14 - protein, 1049 aa, synthetic construct
  REGION 1..1049: note = Variant of cytochrome P450
MTIKEMPQPKTFGELKNLPLLNTDKPVQALMRIADELGEIFKFEAPGSVTRFLSSQRLIKEACDESRFDKNLSQALKFARDFLGDGLFTSWTHEPNWKKAHNILLPSFSQRAMKRYHAMMVDIAVQLVQKWERLNADEHIEVSEDMTRLTLDTIGLCGFNYRFNSFYRDQPHPFIVSMVRALDEVMNKLQRANPDDPAYDENKRQCQEDIKVMNDYVDKIIADRKARGEQSHDLLTQMLNGKDPETGEPLDDGNISYQIITFLIAGHETTSGLLSFALYFLVKNPHVLQKVAEEAARVLVDPVPSYKQVKQLKYVGMVLNEALRLWPTAGAFSLYAKEDTVLGGEYPLTKGDEVMVLIPQLHRDKTIWGDDVEEFRPERFENPSAIPQHAFKPFGNGQRACIGQQFALHEATLVLGMMLKHFDFEDHTNYELDIKETLTLKPEGFVVKAKSKKIPLGGIPSPSTEQSAKKVRKKAENAHNTPLLVLYGSNAGTAEGTARDLADIAMSKGFAPQVATLDSHAGNLPREGAVLIVTASYNGHPPDNAKQFVDWLDQASADEVKGVRYSVFGCGDKNWAATYQKVPAFIDETLAAKGAENIADRGEADASDDFEGTYEEWRDHMWSDVAAYFNLDIENSEDNKSTLSLQFVDSAADMPLAKMHGAFSTNVVASKELQQPGSARSTRHLEIELPKEASYQEGDHLGVIPRNYEGIVNRVTARFGLSASQQIRLEAEEEKLAHLPLAKTVSVEELLQYVELQDPVTRTQLRAMAAKTVCPPHKVELEALLEKQAYKEQVLAKRLTMLELLEKYPACEMKFSEFIALLPSIRPRYYSISSSPRVDEKQASITVSVVSGEAWSGYGEYKGIASNYLAELQEGDTITCFISTPQSEFTLPKDPETPLIMVGPGTGVAPFRGFVQARKQLKEQGQSLGEAHLYFGCRSPHEDYLYQEELENAQSEGIITLHTAFSRMPNQPKTYVQHVMEQDGKKLIELLDQGAHFYICGDGSQMAPAVEATLMKSYADVHQVSEADARLWLQQLEEKGRYAKDVWAG

SEQ ID NO: 15 - DNA, 3147 bp, synthetic construct
  misc_feature 1..3147: note = Variant of cytochrome P450
  source 1..3147: mol_type = other DNA
atgacaataaaggaaatgccgcagccgaaaacgtttggagaacttaaaaatttaccgttattaaacacagataaaccggttcaagctttgatgcgtattgcggatgaattaggagaaatctttaaattcgaggcgcctggtagcgtaacgcgctttttatcaagtcagcgtctaattaaagaagcatgcgatgaatcacgctttgataaaaacttaagtcaagcgcttaaatttgcacgtgattttcttggagacgggttatttacaagctggacgcatgaaccgaattggaaaaaagcgcataatatcttaggcccaagctttagtcagcgtgcaatgaaacgttatcatgcgatgatggtcgatatcgccgtgcagcttgttcaaaagtgggagcgtctaaatgcagatgagcatattgaagtatcggaagacatgacacgtttaacgcttgatacaattggtctttgcggctttaactatcgctttaacagcttttaccgagatcagcctcatccatttattgtgagtatggtccgtgcactggatgaagtaatgaacaagctgcagcgagcaaatccagacgacccagcttatgatgaaaacaagcgccagtgtcaagaagatatcaaggtgatgaacgactatgtagataaaattattgcagatcgcaaagcaaggggtgaacaaagccatgatttattaacgcagatgctaaacggaaaagatccagaaacgggtgagccgcttgatgacgggaacattcgttatcaaattattacattcttaattgcgggacacgaaacaacaagtggtcttttatcatttgcgctgtatttcttagtgaaaaatccacatgtattacaaaaagtagcagaagaagcagcacgagttctagtagatcctgttccaagctacaaacaagtcaaacagcttaaatatgtcggcatggtcttaaacgaagcgctgcgcttatggccaactgctcctgcgttttccctatatgcaaaagaagatacggtgcttggaggagaatatcctttaacgaaaggcgacgaagtaatggttctgattcctcagcttcaccgtgataaaacaatttggggagacgatgtggaggagttccgtccagagcgttttgaaaatccaagtgcgattccgcagcatgcgtttaaaccgtttggaaacggtcagcgtgcgtgtatcggtcagcagttcgctcttcatgaagcaacgctggtacttggtatgatgctaaaacactttgactttgaagatcatacaaactacgagctcaagattaaagaaactttaacgttaaaacctgaaggctttgtggtaaaagcaaaatcgaaaaaaattccgcttggcggtattccttcacctagcactgaacagtctgctaaaaaagtacgcaaaaaggcagaaaacgctcataatacgccgctgcttgtgctatacggttcaaatgcgggaacagctgaaggaacggcgcgtgatttagcagatattgcaatgagcaaaggatttgcaccgcaggtcgcaacgcttgattcacacgccggaaatcttccgcgcgaaggagctgtattaattgtaacggcgtcttataacggtcatccgcctgataacgcaaagcaatttgtccgctggttagaccaagcgtctgctgatgaagtaaaaggcgttcgctactccgtatttggatgcggcgataaaaactgggctgcgacgtatcaaaaagtgcctgcttttatcgatgaaacgcttgccgctaaaggggcagaaaacatcgctgaccgcggtgaagcagatgcaagcgacgactttgaaggcacatatgaagaatggcgtgatcatatgtggagtgacgtagcagcctactttaacctcgacattgaaaacagtgaagataataaatctactctttcacttcaatttgtcgacagcgccgcggatatgccgcttgcgaaaatgcacggtgcgttttcaacgaacgtcgtagcaagcaaagaacttcaacagccaggcagtgcacgaagcacgcgacatctggaaattgaacttccaaaagaagcttcttatcaagaaggagatcatttaggtgttattcctcgcaactatgaaggaatagtaaaccgtgtaacagcaaggttcggcctaagcgcatcacagcaaatccgtctggaagcagaagaagaaaaattagctcatttgccactcgctaaaacagtatccgtagaagagcttctgcaatacgtggagcttcaagatcctgttacgcgcacgcagcttcgcgcaatggctgctaaaacggtctgcccgccgcataaagtagagcttgaagccttgcttgaaaagcaagcctacaaagaacaagtgctggcaaaacgtttaacaatgcttgaactgcttgaaaaatacccggcgtgtgaaatgaaattcagcgaatttatcgcccttctgccaagcatccgcccgcgctattactcgatttcttcatcacctcgtgtcgatgaaaaacaagcaagcatcacggtcagcgttgtctcaggagaagcgtggagcggatatggagaatataaaggaattgcgtcgaactatcttgccgagctgcaagaaggagatacgattacgtgctttatttccacaccgcagtcagaatttacgctgccaaaagaccctgaaacgccgcttatcatggtcggaccgggaacaggcgtcgcgccgtttagaggctttgtgcaggcgcgcaaacagctaaaagaacaaggacagtcacttggagaagcacatttatacttcggctgccgttcacctcatgaagactatctgtatcaagaagagcttgaaaacgcccaaagcgaaggcatcattacgcttcataccgctttttctcgcatgccaaatcagccgaaaacatacgttcagcacgtaatggaacaagacggcaagaaattgattgaacttcttgatcaaggagcgcacttctatatttgcggagacggaagccaaatggcacctgccgttgaagcaacgcttatgaaaagctatgctgacgttcaccaagtgagtgaagcagacgctcgcttatggctgcagcagctagaagaaaaaggccgatacgcaaaagacgtgtgggctggg

SEQ ID NO: 16 - protein, 1049 aa, synthetic construct
  REGION 1..1049: note = Variant of cytochrome P450
MTIKEMPQPKTFGELKNLPLLNTDKPVQALMRIADELGEIFKFEAPGSVTRFLSSQRLIKEACDESRFDKNLSQALKFARDFLGDGLFTSWTHEPNWKKAHNILGPSFSQRAMKRYHAMMVDIAVQLVQKWERLNADEHIEVSEDMTRLTLDTIGLCGFNYRFNSFYRDQPHPFIVSMVRALDEVMNKLQRANPDDPAYDENKRQCQEDIKVMNDYVDKIIADRKARGEQSHDLLTQMLNGKDPETGEPLDDGNIRYQIITFLIAGHETTSGLLSFALYFLVKNPHVLQKVAEEAARVLVDPVPSYKQVKQLKYVGMVLNEALRLWPTAPAFSLYAKEDTVLGGEYPLTKGDEVMVLIPQLHRDKTIWGDDVEEFRPERFENPSAIPQHAFKPFGNGQRACIGQQFALHEATLVLGMMLKHFDFEDHTNYELKIKETLTLKPEGFVVKAKSKKIPLGGIPSPSTEQSAKKVRKKAENAHNTPLLVLYGSNAGTAEGTARDLADIAMSKGFAPQVATLDSHAGNLPREGAVLIVTASYNGHPPDNAKQFVRWLDQASADEVKGVRYSVFGCGDKNWAATYQKVPAFIDETLAAKGAENIADRGEADASDDFEGTYEEWRDHMWSDVAAYFNLDIENSEDNKSTLSLQFVDSAADMPLAKMHGAFSTNVVASKELQQPGSARSTRHLEIELPKEASYQEGDHLGVIPRNYEGIVNRVTARFGLSASQQIRLEAEEEKLAHLPLAKTVSVEELLQYVELQDPVTRTQLRAMAAKTVCPPHKVELEALLEKQAYKEQVLAKRLTMLELLEKYPACEMKFSEFIALLPSIRPRYYSISSSPRVDEKQASITVSVVSGEAWSGYGEYKGIASNYLAELQEGDTITCFISTPQSEFTLPKDPETPLIMVGPGTGVAPFRGFVQARKQLKEQGQSLGEAHLYFGCRSPHEDYLYQEELENAQSEGIITLHTAFSRMPNQPKTYVQHVMEQDGKKLIELLDQGAHFYICGDGSQMAPAVEATLMKSYADVHQVSEADARLWLQQLEEKGRYAKDVWAG

SEQ ID NO: 17 - DNA, 3147 bp, synthetic construct
  misc_feature 1..3147: note = Variant of cytochrome P450
  source 1..3147: mol_type = other DNA
atgacaataaaggaaatgccgcagccgaaaacgtttggagaacttaaaaatttaccgttattaaacacagataaaccggttcaagctttgatgcgtattgcggatgaattaggagaaatctttaaattcgaggcgcctggtagcgtaacgcgctttttatcaagtcagcgtctaattaaagaagcatgcgatgaatcacgctttgataaaaacttaagtcaagcgcttaaatttgcacgtgattttcttggagacgggttatttacaagctggacgcatgaaccgaattggaaaaaagcgcataatatcttacttccaagctttagtcagcgtgcaatgaaacgttatcatgcgatgatggtcgatatcgccgtgcagcttgttcaaaagtgggagcgtctaaatgcagatgagcatattgaagtatcggaagacatgacacgtttaacgcttgatacaattggtctttgcggctttaactatcgctttaacagcttttaccgagatcagcctcatccatttattgtgagtatggtccgtgcagctgatgaagtaatgaacaagctgcagcgagcaaatccagacgacccagcttatgatgaaaacaagcgccagtgtcaagaagatatcaaggtgatgaacgactatgtagataaaattattgcagatcgcaaagcaaggggtgaacaaagccatgatttattaacgcagatgctaaacggaaaagatccagaaacgggtgagccgcttgatgacgggaacattagctatcaaattattacattcttaattgcgggacacgaaacaacaagtggtcttttatcatttgcgctgtatttcttagtgaaaaatccacatgtattacaaaaagtagcagaagaagcagcacgagttctagtagatcctgttccaagctacaaacaagtcaaacagcttaaatatgtcggcatggtcttaaacgaagcgctgcgcttatggccaactgctcctgcgttttccctatatgcaaaagaagatacggtgcttggaggagaatatcctttaaccaaaggcgacgaagtaatggttctgattcctcagcttcaccgtgataaaacaatttggggagacgatgtggaggagttccgtccagagcgttttgaaaatccaagtgcgattccgcagcatgcgtttaaaccgtttggaaacggtcagcgtgcgtgtatcggtcagcagttcgctcttcatgaagcaacgctggtacttggtatgatgctaaaacactttgactttgaagatcatacaaactacgagctcgatattaaagaaactttaacgttaaaacctgaaggctttgtggtaaaagcaaaatcgaaaaaaattccgcttggcggtattccttcacctagcactgaacagtctgctaaaaaagtacgcaaaaaggcagaaaacgctcataatacgccgctgcttgtgctatacggttcaaatgcgggaacagctgaaggaacggcgcgtgatttagcagatattgcaatgagcaaaggatttgcaccgcaggtcgcaacgcttgattcacacgccggaaatcttccgcgcgaaggagctgtattaattgtaacggcgtcttataacggtcatccgcctgataacgcaaagcaatttgtcgactggttagaccaagcgtctgctgatgaagtaaaaggcgttcgctactccgtatttggatgcggcgataaaaactgggctgcgacgtatcaaaaagtgcctgcttttatcgatgaaacgcttgccgctaaaggggcagaaaacatcgctgaccgcggtgaagcagatgcaagcgacgactttgaaggcacatatgaagaatggcgtgatcatatgtggagtgacgtagcagcctactttaacctcgacattgaaaacagtgaagataataaatctactctttcacttcaatttgtcgacagcgccgcggatatgccgcttgcgaaaatgcacggtgcgttttcaacgaacgtcgtagcaagcaaagaacttcaacagccaggcagtgcacgaagcacgcgacatcttgaaattgaacttccaaaagaagcttcttatcaagaaggagatcatttaggtgttattcctcgcaactatgaaggaatagtaaaccgtgtaacagcaaggttcggcctaagcgcatcacagcaaatccgtctggaagcagaagaagaaaaattagctcatttgccactcgctaaaacagtatccgtagaagagcttctgcaatacgtggagcttcaagatcctgttacgcgcacgcagcttcgcgcaatggctgctaaaacggtctgcccgccgcataaagtagagcttgaagccttgcttgaaaagcaagcctacaaagaacaagtgctggcaaaacgtttaacaatgcttgaactgcttgaaaaatacccggcgtgtgaaatgaaattcagcgaatttatcgcccttctgccaagcatacgcccgcgctattactcgatttcttcatcacctcgtgtcgatgaaaaacaagcaagcatcacggtcagcgttgtctcaggagaagcgtggagcggatatggagaatataaaggaattgcgtcgaactatcttgccgagctgcaagaaggagatacgattacgtgctttatttccacaccgcagtcagaatttacgctgccaaaagaccctgaaacgccgcttatcatggtcggaccgggaacaggcgtcgcgccgtttagaggctttgtgcaggcgcgcaaacagctaaaagaacaaggacagtcacttggagaagcacatttatacttcggctgccgttcacctcatgaagactatctgtatcaagaagagcttgaaaacgcccaaagcgaaggcatcattacgcttcataccgctttttctcgcatgccaaatcagccgaaaacatacgttcagcacgtaatggaacaagacggcaagaaattgattgaacttcttgatcaaggagcgcacttctatatttgcggagacggaagccaaatggcacctgccgttgaagcaacgcttatgaaaagctatgctgacgttcaccaagtgagtgaagcagacgctcgcttatggctgcagcagctagaagaaaaaggccgatacgcaaaagacgtgtgggctggg

SEQ ID NO: 18 - protein, 1049 aa, synthetic construct
  REGION 1..1049: note = Variant of cytochrome P450
MTIKEMPQPKTFGELKNLPLLNTDKPVQALMRIADELGEIFKFEAPGSVTRFLSSQRLIKEACDESRFDKNLSQALKFARDFLGDGLFTSWTHEPNWKKAHNILLPSFSQRAMKRYHAMMVDIAVQLVQKWERLNADEHIEVSEDMTRLTLDTIGLCGFNYRFNSFYRDQPHPFIVSMVRAADEVMNKLQRANPDDPAYDENKRQCQEDIKVMNDYVDKIIADRKARGEQSHDLLTQMLNGKDPETGEPLDDGNISYQIITFLIAGHETTSGLLSFALYFLVKNPHVLQKVAEEAARVLVDPVPSYKQVKQLKYVGMVLNEALRLWPTAPAFSLYAKEDTVLGGEYPLTKGDEVMVLIPQLHRDKTIWGDDVEEFRPERFENPSAIPQHAFKPFGNGQRACIGQQFALHEATLVLGMMLKHFDFEDHTNYELDIKETLTLKPEGFVVKAKSKKIPLGGIPSPSTEQSAKKVRKKAENAHNTPLLVLYGSNAGTAEGTARDLADIAMSKGFAPQVATLDSHAGNLPREGAVLIVTASYNGHPPDNAKQFVDWLDQASADEVKGVRYSVFGCGDKNWAATYQKVPAFIDETLAAKGAENIADRGEADASDDFEGTYEEWRDHMWSDVAAYFNLDIENSEDNKSTLSLQFVDSAADMPLAKMHGAFSTNVVASKELQQPGSARSTRHLEIELPKEASYQEGDHLGVIPRNYEGIVNRVTARFGLSASQQIRLEAEEEKLAHLPLAKTVSVEELLQYVELQDPVTRTQLRAMAAKTVCPPHKVELEALLEKQAYKEQVLAKRLTMLELLEKYPACEMKFSEFIALLPSIRPRYYSISSSPRVDEKQASITVSVVSGEAWSGYGEYKGIASNYLAELQEGDTITCFISTPQSEFTLPKDPETPLIMVGPGTGVAPFRGFVQARKQLKEQGQSLGEAHLYFGCRSPHEDYLYQEELENAQSEGIITLHTAFSRMPNQPKTYVQHVMEQDGKKLIELLDQGAHFYICGDGSQMAPAVEATLMKSYADVHQVSEADARLWLQQLEEKGRYAKDVWAG

SEQ ID NO: 19 - DNA, 3147 bp, synthetic construct
  misc_feature 1..3147: note = Variant of cytochrome P450
  source 1..3147: mol_type = other DNA
atgacaataaaggaaatgccgcagccgaaaacgtttggagaacttaaaaatttaccgttattaaacacagataaaccggttcaagctttgatgcgtattgcggatgaattaggagaaatctttaaattcgaggcgcctggtagcgtaacgcgctttttatcaagtcagcgtctaattaaagaagcatgcgatgaatcacgctttgataaaaacttaagtcaaggtcttaaatttgcacgtgattttcttggagacgggttatttacaagctggacgcatgaaccgaattggaaaaaagcgcataatatcttacttccaagctttagtcagcgtgcaatgaaacgttatcatgcgatgatggtcgatatcgccgtgcagcttgttcaaaagtgggagcgtctaaatgcagatgagcatattgaagtatcggaagacatgacacgtttaacgcttgatacaattggtctttgcggctttaactatcgctttaacagcttttaccgagatcagcctcatccatttattgtgagtatggtccgtgcactggatgaagtaatgaacaagctgcagcgagcaaatccagacgacccagcttatgatgaaaacaagcgccagtgtcaagaagatatcaaggtgatgaacgactatgtagataaaattattgcagatcgcaaagcaaggggtgaacaaagccatgatttattaacgcagatgctaaacggaaaagatccagaaacgggtgagccgcttgatgacgggaacattagctatcaaattattacattcttaattgcgggacacgaaacaacaagtggtcttttatcatttgcgctgtatttcttagtgaaaaatccacatgtattacaaaaagtagcagaagaagcagcacgagttctagtagatcctgttccaagctacaaacaagtcaaacagcttaaatatgtcggcatggtcttaaacgaagcgctgcgcttatggccaactgctcctgcgttttccctatatgcaaaagaagatacggtgcttggaggagaatatcctttaaccaaaggcgacgaagtaatggttctgattcctcagcttcaccgtgataaaacaatttggggagacgatgtggaggagttccgtccagagcgttttgaaaatccaagtgcgattccgcagcatgcgtttaaaccgtttggaaacggtcagcgtgcgtgtatcggtcagcagttcgctcttcatgaagcaacgctggtacttggtatgatgctaaaacactttgactttgaagatcatacaaactacgagctcgatattaaagaaactttaacgttaaaacctgaaggctttgtggtaaaagcaaaatcgaaaaaaattccgcttggcggtattccttcacctagcactgaacagtctgctaaaaaagtacgcaaaaaggcagaaaacgctcataatacgccgctgcttgtgctatacggttcaaatgcgggaacagctgaaggaacggcgcgtgatttagcagatattgcaatgagcaaaggatttgcaccgcaggtcgcaacgcttgattcacacgccggaaatcttccgcgcgaaggagctgtattaattgtaacggcgtcttataacggtcatccgcctgataacgcaaagcaatttgtcgactggttagaccaagcgtctgctgatgaagtaaaaggcgttcgctactccgtatttggatgcggcgataaaaactgggctgcgacgtatcaaaaagtgcctgcttttatcgatgaaacgcttgccgctaaaggggcagaaaacatcgctgaccgcggtgaagcagatgcaagcgacgactttgaaggcacatatgaagaatggcgtgatcatatgtggagtgacgtagcagcctactttaacctcgacattgaaaacagtgaagataataaatctactctttcacttcaatttgtcgacagcgccgcggatatgccgcttgcgaaaatgcacggtgcgttttcaacgaacgtcgtagcaagcaaagaacttcaacagccaggcagtgcacgaagcacgcgacatcttgaaattgaacttccaaaagaagcttcttatcaagaaggagatcatttaggtgttattcctcgcaactatgaaggaatagtaaaccgtgtaacagcaaggttcggcctaagcgcatcacagcaaatccgtctggaagcagaagaagaaaaattagctcatttgccactcgctaaaacagtatccgtagaagagcttctgcaatacgtggagcttcaagatcctgttacgcgcacgcagcttcgcgcaatggctgctaaaacggtctgcccgccgcataaagtagagcttgaagccttgcttgaaaagcaagcctacaaagaacaagtgctggcaaaacgtttaacaatgcttgaactgcttgaaaaatacccggcgtgtgaaatgaaattcagcgaatttatcgcccttctgccaagcatacgcccgcgctattactcgatttcttcatcacctcgtgtcgatgaaaaacaagcaagcatcacggtcagcgttgtctcaggagaagcgtggagcggatatggagaatataaaggaattgcgtcgaactatcttgccgagctgcaagaaggagatacgattacgtgctttatttccacaccgcagtcagaatttacgctgccaaaagaccctgaaacgccgcttatcatggtcggaccgggaacaggcgtcgcgccgtttagaggctttgtgcaggcgcgcaaacagctaaaagaacaaggacagtcacttggagaagcacatttatacttcggctgccgttcacctcatgaagactatctgtatcaagaagagcttgaaaacgcccaaagcgaaggcatcattacgcttcataccgctttttctcgcatgccaaatcagccgaaaacatacgttcagcacgtaatggaacaagacggcaagaaattgattgaacttcttgatcaaggagcgcacttctatatttgcggagacggaagccaaatggcacctgccgttgaagcaacgcttatgaaaagctatgctgacgttcaccaagtgagtgaagcagacgctcgcttatggctgcagcagctagaagaaaaaggccgatacgcaaaagacgtgtgggctggg

SEQ ID NO: 20 - protein, 1049 aa, synthetic construct
  REGION 1..1049: note = Variant of cytochrome P450
MTIKEMPQPKTFGELKNLPLLNTDKPVQALMRIADELGEIFKFEAPGSVTRFLSSQRLIKEACDESRFDKNLSQGLKFARDFLGDGLFTSWTHEPNWKKAHNILLPSFSQRAMKRYHAMMVDIAVQLVQKWERLNADEHIEVSEDMTRLTLDTIGLCGFNYRFNSFYRDQPHPFIVSMVRALDEVMNKLQRANPDDPAYDENKRQCQEDIKVMNDYVDKIIADRKARGEQSHDLLTQMLNGKDPETGEPLDDGNISYQIITFLIAGHETTSGLLSFALYFLVKNPHVLQKVAEEAARVLVDPVPSYKQVKQLKYVGMVLNEALRLWPTAPAFSLYAKEDTVLGGEYPLTKGDEVMVLIPQLHRDKTIWGDDVEEFRPERFENPSAIPQHAFKPFGNGQRACIGQQFALHEATLVLGMMLKHFDFEDHTNYELDIKETLTLKPEGFVVKAKSKKIPLGGIPSPSTEQSAKKVRKKAENAHNTPLLVLYGSNAGTAEGTARDLADIAMSKGFAPQVATLDSHAGNLPREGAVLIVTASYNGHPPDNAKQFVDWLDQASADEVKGVRYSVFGCGDKNWAATYQKVPAFIDETLAAKGAENIADRGEADASDDFEGTYEEWRDHMWSDVAAYFNLDIENSEDNKSTLSLQFVDSAADMPLAKMHGAFSTNVVASKELQQPGSARSTRHLEIELPKEASYQEGDHLGVIPRNYEGIVNRVTARFGLSASQQIRLEAEEEKLAHLPLAKTVSVEELLQYVELQDPVTRTQLRAMAAKTVCPPHKVELEALLEKQAYKEQVLAKRLTMLELLEKYPACEMKFSEFIALLPSIRPRYYSISSSPRVDEKQASITVSVVSGEAWSGYGEYKGIASNYLAELQEGDTITCFISTPQSEFTLPKDPETPLIMVGPGTGVAPFRGFVQARKQLKEQGQSLGEAHLYFGCRSPHEDYLYQEELENAQSEGIITLHTAFSRMPNQPKTYVQHVMEQDGKKLIELLDQGAHFYICGDGSQMAPAVEATLMKSYADVHQVSEADARLWLQQLEEKGRYAKDVWAG

SEQ ID NO: 21 - DNA, 3147 bp, synthetic construct
  misc_feature 1..3147: note = Variant of cytochrome P450
  source 1..3147: mol_type = other DNA
atgacaataaaggaaatgccgcagccgaaaacgtttggagaacttaaaaatttaccgttattaaacacagataaaccggttcaagctttgatgcgtattgcggatgaattaggagaaatctttaaattcgaggcgcctggtagcgtaacgcgctttttatcaagtcagcgtctaattaaagaagcatgcgatgaatcacgctttgataaaaacttaagtcaagcgcttaaatttgcacgtgattttcttggagacgggttatttacaagctggacgcatgaaccgaattggaaaaaagcgcataatatcttactgccaagctttagtcagcgtgcaatgaaacgttatcatgcgatgatggtcgatatcgccgtgcagcttgttcaaaagtgggagcgtctaaatgcagatgagcatattgaagtatcggaagacatgacacgtttaacgcttgatacaattggtctttgcggctttaactatcgctttaacagcttttaccgagatcagcctcatccatttattgtgagtatggtccgtgcactggatgaagtaatgaacaagctgcagcgagcaaatccagacgacccagcttatgatgaaaacaagcgccagtgtcaagaagatatcaaggtgatgaacgactatgtagataaaattattgcagatcgcaaagcaaggggtgaacaaagccatgatttattaacgcagatgctaaacggaaaagatccagaaacgggtgagccgcttgatgacgggaacattagctatcaaattattacattcttaattgcgggacacgaaacaacaagtggtcttttatcatttgcgctgtatttcttagtgaaaaatccacatgtattacaaaaagtagcagaagaagcagcacgagttctagtagatcctgttccaagctacaaacaagtcaaacagcttaaatatgtcggcatggtcttaaacgaagcgctgcgcttatggccaactgctcctgcgttttccctatatgcaaaagaagatacggtgcttggaggagaatatcctttagcgaaaggcgacgaagtaatggttctgattcctcagcttcaccgtgataaaacaatttggggagacgatgtggaggagttccgtccagagcgttttgaaaatccaagtgcgattccgcagcatgcgtttaaaccgtttggaaacggtcagcgtgcgtgtatcggtcagcagttcgctcttcatgaagcaacgctggtacttggtatgatgctaaaacactttgactttgaagatcatacaaactacgagctcgatattaaagaaactttaacgttaaaacctgaaggctttgtggtaaaagcaaaatcgaaaaagattccgcttggcggtattccttcacctagcactgaacagtctgctaaaaaagtacgcaaaaaggcagaaaacgctcataatacgccgctgcttgtgctatacggttcaaatgcgggaacagctgaaggaacggcgcgtgatttagcagatattgcaatgagcaaaggatttgcaccgcaggtcgcaacgcttgattcacacgccggaaatcttccgcgcgaaggagctgtattaattgtaacggcgtcttataacggtcatccgcctgataacgcaaagcaatttgtcgactggttagaccaagcgtctgctgatgaagtaaaaggcgttcgctactccgtatttggatgcggcgataaaacctgggctgcgacgtatcaaaaagtgcctgcttttatcgatgaaacgcttgccgctaaaggggcagaaaacatcgctcgccgcggtgaagcagatgcaagcgacgactttgaaggcacatatgaagaatggcgtgatcatatgtggaccgacgtagcagcctactttaacctcgacattgaaaacagtgaagataataaatctactctttcacttcaatttgtcgacagcgccgcggatatgccgcttgcgaaaatgcacggtgcgttttcaacgaacgtcgtagcaagcaaagaacttcaacagccaggcagtgcacgaagcacgcgacatcttgaaattgaacttccaaaagaagcttcttatcaagaaggagatcatttaggtgttattcctcgcaactatgaaggaatagtaaaccgtgtaacagcaaggttcggcctaagcgcatcacagcaaatccgtctggaagcagaagaagaaaaattagctcatttgccactcgctaaaacagtatccgtagaggagcttctgcaatacgtggagcttcaagatcctgttacgcgcacgcagcttcgcgcaatggctgctaaaacggtctgcccgccgcataaagtagagcttgaagccttgcttgaaaagcaagcctacaaagaacaagtgctggcaaaacgtttaacaatgcttgaactgcttgaaaaatacccggcgtgtgaaatgaaattcagcgaatttatcgcccttctgccaagcctgcgcccgcgctattactcgatttcttcatcacctcgtgtcgatgaaaaacaagcaagcatcacggtcagcgttgtctcaggaccggcgtggagcggatatggagaatataaaggaattgcgtcgaactatcttgccgagctgcaagaaggagatacgattacgtgctttatttccacaccgcagtcagaatttacgctgccaaaagaccctgaaacgccgcttatcatggtcggaccgggaacaggcgtcgcgccgtttagaggctttattcaggcgcgcaaacagctaaaagaacaaggacagtcacttggagaagcacatttatacttcggctgccgttcacctcatgaagactatctgtatcaagaagagcttgaaaacgcccaaagcgaaggcatcattacgcttcataccgctttttctcgcatgccaaatcagccgaaaacatacgttcagcacgtaatggaacaagacggcaagaaattgattgaacttcttgatcaaggagcgcacttctatatttgcggagacggaagccaaatggcacctgccgttgaagcaacgcttatgaaaagctatgctgacgttcaccaagtgagtgaagcagacgctcgcttatggctgcagcagctagaagaaaaaggccgatacgcaaaagacgtgtgggctggg

SEQ ID NO: 22 - protein, 1049 aa, synthetic construct
  REGION 1..1049: note = Variant of cytochrome P450
MTIKEMPQPKTFGELKNLPLLNTDKPVQALMRIADELGEIFKFEAPGSVTRFLSSQRLIKEACDESRFDKNLSQALKFARDFLGDGLFTSWTHEPNWKKAHNILLPSFSQRAMKRYHAMMVDIAVQLVQKWERLNADEHIEVSEDMTRLTLDTIGLCGFNYRFNSFYRDQPHPFIVSMVRALDEVMNKLQRANPDDPAYDENKRQCQEDIKVMNDYVDKIIADRKARGEQSHDLLTQMLNGKDPETGEPLDDGNISYQIITFLIAGHETTSGLLSFALYFLVKNPHVLQKVAEEAARVLVDPVPSYKQVKQLKYVGMVLNEALRLWPTAPAFSLYAKEDTVLGGEYPLAKGDEVMVLIPQLHRDKTIWGDDVEEFRPERFENPSAIPQHAFKPFGNGQRACIGQQFALHEATLVLGMMLKHFDFEDHTNYELDIKETLTLKPEGFVVKAKSKKIPLGGIPSPSTEQSAKKVRKKAENAHNTPLLVLYGSNAGTAEGTARDLADIAMSKGFAPQVATLDSHAGNLPREGAVLIVTASYNGHPPDNAKQFVDWLDQASADEVKGVRYSVFGCGDKTWAATYQKVPAFIDETLAAKGAENIARRGEADASDDFEGTYEEWRDHMWTDVAAYFNLDIENSEDNKSTLSLQFVDSAADMPLAKMHGAFSTNVVASKELQQPGSARSTRHLEIELPKEASYQEGDHLGVIPRNYEGIVNRVTARFGLSASQQIRLEAEEEKLAHLPLAKTVSVEELLQYVELQDPVTRTQLRAMAAKTVCPPHKVELEALLEKQAYKEQVLAKRLTMLELLEKYPACEMKFSEFIALLPSLRPRYYSISSSPRVDEKQASITVSVVSGPAWSGYGEYKGIASNYLAELQEGDTITCFISTPQSEFTLPKDPETPLIMVGPGTGVAPFRGFIQARKQLKEQGQSLGEAHLYFGCRSPHEDYLYQEELENAQSEGIITLHTAFSRMPNQPKTYVQHVMEQDGKKLIELLDQGAHFYICGDGSQMAPAVEATLMKSYADVHQVSEADARLWLQQLEEKGRYAKDVWAG

SEQ ID NO: 23 - DNA, 3147 bp, synthetic construct
  misc_feature 1..3147: note = Variant of cytochrome P450
  source 1..3147: mol_type = other DNA
atgacaataaaggaaatgccgcagccgaaaacgtttggagaacttaaaaatttaccgttattaaacacagataaaccggttcaagctttgatgcgtattgcggatgaattaggagaaatctttaaattcgaggcgcctggtagcgtaacgcgctttttatcaagtcagcgtctaattaaagaagcatgcgatgaatcacgctttgataaaaacttaagtcaagcgcttaaatttgcacgtgattttcttggagacgggttatttacaagctggacgcatgaaccgaattggaaaaaagcgcataatatcttacttccaagctttagtcagcgtgcaatgaaacgttatcatgcgatgatggtcgatatcgccgtgcagcttgttcaaaagtgggagcgtctaaatgcagatgagcatattgaagtatcggaagacatgacacgtttaacgcttgatacaattggtctttgcggctttaactatcgctttaacagcttttaccgagatcagcctcatccatttattgtgagtatggtccgtgcactggatgaagtaatgaacaagctgcagcgagcaaatccagacgacccagcttatgatgaaaacaagcgccagtgtcaagaagatatcaaggtgatgaacgactatgtagataaaattattgcagatcgcaaagcaaggggtgaacaaagccatgatttattaacgcagatgctaaacggaaaagatccagaaacgggtgagccgcttgatgacgggaacattcgttatcaaattattacattcttaattgcgggacacgaaacaacaagtggtcttttatcatttgcgctgtatttcttagtgaaaaatccacatgtattacaaaaagtagcagaagaagcagcacgagttctagtagatcctgttccaagctacaaacaagtcaaacagcttaaatatgtcggcatggtcttaaacgaagcgctgcgcttatggccaactgctcctgcgttttccctatatgcaaaagaagatacggtgcttggaggagaatatcctttaaccaaaggcgacgaagtaatggttctgattcctcagcttcaccgtgataaaacaatttggggagacgatgtggaggagttccgtccagagcgttttgaaaatccaagtgcgattccgcagcatgcgtttaaaccgtttggaaacggtcagcgtgcgtgtatcggtcagcagttcgctcttcatgaagcaacgctggtacttggtatgatgctaaaacactttgactttgaagatcatacaaactacgagctcgttattaaagaaactttaacgttaaaacctgaaggctttgtggtaaaagcaaaatcgaaaaaaattccgcttggcggtattccttcacctagcactgaacagtctgctaaaaaagtacgcaaaaaggcagaaaacgctcataatacgccgctgcttgtgctatacggttcaaatgcgggaacagctgaaggaacggcgcgtgatttagcagatattgcaatgagcaaaggatttgcaccgcaggtcgcaacgcttgattcacacgccggaaatcttccgcgcgaaggagctgtattaattgtaacggcgtcttataacggtcatccgcctgataacgcaaagcaatttgtcgactggttagaccaagcgtctgctgatgaagtaaaaggcgttcgctactccgtatttggatgcggcgataaaacctgggctgcgacgtatcaaaaagtgcctgcttttatcgatgaaacgcttgccgctaaaggggcagaaaacatcgctcgccgcggtgaagcagatgcaagcgacgactttgaaggcacatatgaagaatggcgtgatcatatgtggagtgacgtagcagcctactttaacctcgacattgaaaacagtgaagataataaatctactctttcacttcaatttgtcgacagcgccgcggatatgccgcttgcgaaaatgcacggtgcgttctcaacgaacgtcgtagcaagcaaagaacttcaacagccaggcagtgcacgaagcacgcgacatcttgaaattgaacttccaaaagaagcttcttatcaagaaggagatcatttaggtgttattcctcgcaactatgaaggaatagtaaaccgtgtaacagcaaggttcggcctaagcgcatcacagcaaatccgtctggaagcagaagaagaaaaattagctcatttgccactcgctaaaacagtatccgtagaagagcttctgcaatacgtggagcttcaagatcctgttacgcgcacgcagcttcgcgcaatggctgctaaaacggtctgcccgccgcataaagtagagcttgaagccttgcttgaaaagcaagcctacaaagaacaagtgctggcaaaacgtttaacaatgcttgaactgcttgaaaaatacccggcgtgtgaaatgaaattcagcgaatttatcgcccttctgccaagcatacgcccgcgctattactcgatttcttcatcacctcgtgtcgatgaaaaacaagcaagcatcacggtcagcgttgtctcaggagaagcgtggagcggatatggagaatataaaggaattgcgtcgaactatcttgccgagctgcaagaaggagatacgattacgtgctttatttccacaccgcagtcagaatttacgctgccaaaagaccctgaaacgccgcttatcatggtcggaccgggaacaggcgtcgcgccgtttagaggctttgtgcaggcgcgcaaacagctaaaagaacaaggacagtcacttggagaagcacatttatacttcggctgccgttcacctcatgaagactatctgtatcaagaagagcttgaaaacgcccaaagcgaaggcatcattacgcttcataccgctttttctcgcatgccaaatcagccgaaaacatacgttcagcacgtaatggaacaagacggcaagaaattgattgaacttcttgatcaaggagcgcacttctatatttgcggagacggaagccaaatggcacctgccgttgaagcaacgcttatgaaaagctatgctgacgttcaccaagtgagtgaagcagacgctcgcttatggctgcagcagctagaagaaaaaggccgatacgcaaaagacgtgtgggctggg

SEQ ID NO: 24 - protein, 1049 aa, synthetic construct
  REGION 1..1049: note = Variant of cytochrome P450
MTIKEMPQPKTFGELKNLPLLNTDKPVQALMRIADELGEIFKFEAPGSVTRFLSSQRLIKEACDESRFDKNLSQALKFARDFLGDGLFTSWTHEPNWKKAHNILLPSFSQRAMKRYHAMMVDIAVQLVQKWERLNADEHIEVSEDMTRLTLDTIGLCGFNYRFNSFYRDQPHPFIVSMVRALDEVMNKLQRANPDDPAYDENKRQCQEDIKVMNDYVDKIIADRKARGEQSHDLLTQMLNGKDPETGEPLDDGNIRYQIITFLIAGHETTSGLLSFALYFLVKNPHVLQKVAEEAARVLVDPVPSYKQVKQLKYVGMVLNEALRLWPTAPAFSLYAKEDTVLGGEYPLTKGDEVMVLIPQLHRDKTIWGDDVEEFRPERFENPSAIPQHAFKPFGNGQRACIGQQFALHEATLVLGMMLKHFDFEDHTNYELVIKETLTLKPEGFVVKAKSKKIPLGGIPSPSTEQSAKKVRKKAENAHNTPLLVLYGSNAGTAEGTARDLADIAMSKGFAPQVATLDSHAGNLPREGAVLIVTASYNGHPPDNAKQFVDWLDQASADEVKGVRYSVFGCGDKTWAATYQKVPAFIDETLAAKGAENIARRGEADASDDFEGTYEEWRDHMWSDVAAYFNLDIENSEDNKSTLSLQFVDSAADMPLAKMHGAFSTNVVASKELQQPGSARSTRHLEIELPKEASYQEGDHLGVIPRNYEGIVNRVTARFGLSASQQIRLEAEEEKLAHLPLAKTVSVEELLQYVELQDPVTRTQLRAMAAKTVCPPHKVELEALLEKQAYKEQVLAKRLTMLELLEKYPACEMKFSEFIALLPSIRPRYYSISSSPRVDEKQASITVSVVSGEAWSGYGEYKGIASNYLAELQEGDTITCFISTPQSEFTLPKDPETPLIMVGPGTGVAPFRGFVQARKQLKEQGQSLGEAHLYFGCRSPHEDYLYQEELENAQSEGIITLHTAFSRMPNQPKTYVQHVMEQDGKKLIELLDQGAHFYICGDGSQMAPAVEATLMKSYADVHQVSEADARLWLQQLEEKGRYAKDVWAG

SEQ ID NO: 25 - DNA, 3147 bp, synthetic construct
  misc_feature 1..3147: note = Variant of cytochrome P450
  source 1..3147: mol_type = other DNA
atgacaataaaggaaatgccgcagccgaaaacgtttggagaacttaaaaatttaccgttattaaacacagataaaccggttcaagctttgatgcgtattgcggatgaattaggagaaatctttaaattcgaggcgcctggtagcgtaacgcgctttttatcaagtcagcgtctaattaaagaagcatgcgatgaatcacgctttgataaaaacttaagtcaagcgcttaaatttgcacgtgattttcttggagacgggttatttacaagctggacgcatgaaccgaattggaaaaaagcgcataatatcttacttccaagctttagtcagcgtgcaatgaaacgttatcatgcgatgatggtcgatatcgccgtgcagcttgttcaaaagtgggagcgtctaaatgcagatgagcatattgaagtatcggaagacatgacacgtttaacgcttgatacaattggtctttgcggctttaactatcgctttaacagcttttaccgagatcagcctcatccatttattgtgagtatggtccgtgcactggatgaagtaatgaacaagctgcagcgagcaaatccagacgacccagcttatgatgaaaacaagcgccagtgtcaagaagatatcaaggtgatgaacgactatgtagataaaattattgcagatcgcaaagcaaggggtgaacaaagccatgatttattaacgcagatgctaaacggaaaagatccagaaacgggtgagccgcttgatgacgggaacattagctatcaaattattacattcttaattgcgggacacgaaacaacaagtggtcttttatcatttgcgctgtatttcttagtgaaaaatccacatgtattacaaaaagtagcagaagaagcagcacgagttctagtagatcctgttccaagctacaaacaagtcaaacagcttaaatatgtcggcatggtcttaaacgaagcgctgcgcttatggccaactgctcctgcgttttccctatatgcaaaagaagatacggtgcttggaggagaatatcctttaaccaaaggcgacgaagtaatggttctgattcctcagcttcaccgtgataaaacaatttggggagacgatgtggaggagttccgtccagagcgttttgaaaatccaagtgcgattccgcagcatgcgtttaaaccgtttggaaacggtcagcgtgcgtgtatcggtcagcagttcgctcttcatgaagcaacgctggtacttggtatgatgctaaaacactttgactttgaagatcatacaaactacgagctcgatattaaagaaatgttaacgttaaaacctgaaggctttgtggtaaaagcaaaatcgaaaaaaattccgcttggcggtattccttcacctagcactgaacagtctgctaaaaaagtacgcaaaaaggcagaaaacgctcataatacgccgctgcttgtgctatacggttcaaatgcgggaacagctgaaggaacggcgcgtgatttagcagatattgcaatgagcaaaggatttgcaccgcaggtcgcaacgcttgattcacacgccggaaatcttccgcgcgaaggagctgtattaattgtaacggcgtcttataacggtcatccgcctgataacgcaaagcaatttgtcgactggttagaccaagcgtctgctgatgaagtaaaaggcgttcgctactccgtatttggatgcggcgataaaaactgggctgcgacgtatcaaaaagtgcctgcttttatcgatgaaacgcttgccgctaaaggggcagaaaacatcgctgaccgcggtgaagcagatgcaagcgacgactttgaaggcacatatgaagaatggcgtgatcatatgtggagtgacgtagcagcctactttaacctcgacattgaaaacagtgaagataataaatctactctttcacttcaatttgtcgacagcgccgcggatatgccgcttgcgaaaatgcacggtgcgttttcaacgaacgtcgtagcaagcaaagaacttcaacagccaggcagtgcacgaagcacgcgacatcttgaaattgaacttccaaaagaagcttcttatcaagaaggagatcatttaggtgttattcctcgcaactatgaaggaatagtaaaccgtgtaacagcaaggttcggcctaagcgcatcacagcaaatccgtctggaagcagaagaagaaaaattagctcatttgccactcgctaaaacagtatccgtagaagagcttctgcaatacgtggagcttcaagatcctgttacgcgcacgcagcttcgcgcaatggctgctaaaacggtctgcccgccgcataaagtagagcttgaagccttgcttgaaaagcaagcctacaaagaacaagtgctggcaaaacgtttaacaatgcttgaactgcttgaaaaatacccggcgtgtgaaatgaaattcagcgaatttatcgcccttctgccaagcatacgcccgcgctattactcgatttcttcatcacctcgtgtcgatgaaaaacaagcaagcatcacggtcagcgttgtctcaggagaagcgtggagcggatatggagaatataaaggaattgcgtcgaactatcttgccgagctgcaagaaggagatacgattacgtgctttatttccacaccgcagtcagaatttacgctgccaaaagaccctgaaacgccgcttatcatggtcggaccgggaacaggcgtcgcgccgtttagaggctttgtgcaggcgcgcaaacagctaaaagaacaaggacagtcacttggagaagcacatttatacttcggctgccgttcacctcatgaagactatctgtatcaagaagagcttgaaaacgcccaaagcgaaggcatcattacgcttcataccgctttttctcgcatgccaaatcagccgaaaacatacgttcagcacgtaatggaacaagacggcaagaaattgattgaacttcttgatcaaggagcgcacttctatatttgcggagacggaagccaaatggcacctgccgttgaagcaacgcttatgaaaagctatgctgacgttcaccaagtgagtgaagcagacgctcgcttatggctgcagcagctagaagaaaaaggccgatacgcaaaagacgtgtgggctggg

SEQ ID NO: 26 - protein, 1049 aa, synthetic construct
  REGION 1..1049: note = Variant of cytochrome P450
MTIKEMPQPKTFGELKNLPLLNTDKPVQALMRIADELGEIFKFEAPGSVTRFLSSQRLIKEACDESRFDKNLSQALKFARDFLGDGLFTSWTHEPNWKKAHNILLPSFSQRAMKRYHAMMVDIAVQLVQKWERLNADEHIEVSEDMTRLTLDTIGLCGFNYRFNSFYRDQPHPFIVSMVRALDEVMNKLQRANPDDPAYDENKRQCQEDIKVMNDYVDKIIADRKARGEQSHDLLTQMLNGKDPETGEPLDDGNISYQIITFLIAGHETTSGLLSFALYFLVKNPHVLQKVAEEAARVLVDPVPSYKQVKQLKYVGMVLNEALRLWPTAPAFSLYAKEDTVLGGEYPLTKGDEVMVLIPQLHRDKTIWGDDVEEFRPERFENPSAIPQHAFKPFGNGQRACIGQQFALHEATLVLGMMLKHFDFEDHTNYELDIKEMLTLKPEGFVVKAKSKKIPLGGIPSPSTEQSAKKVRKKAENAHNTPLLVLYGSNAGTAEGTARDLADIAMSKGFAPQVATLDSHAGNLPREGAVLIVTASYNGHPPDNAKQFVDWLDQASADEVKGVRYSVFGCGDKNWAATYQKVPAFIDETLAAKGAENIADRGEADASDDFEGTYEEWRDHMWSDVAAYFNLDIENSEDNKSTLSLQFVDSAADMPLAKMHGAFSTNVVASKELQQPGSARSTRHLEIELPKEASYQEGDHLGVIPRNYEGIVNRVTARFGLSASQQIRLEAEEEKLAHLPLAKTVSVEELLQYVELQDPVTRTQLRAMAAKTVCPPHKVELEALLEKQAYKEQVLAKRLTMLELLEKYPACEMKFSEFIALLPSIRPRYYSISSSPRVDEKQASITVSVVSGEAWSGYGEYKGIASNYLAELQEGDTITCFISTPQSEFTLPKDPETPLIMVGPGTGVAPFRGFVQARKQLKEQGQSLGEAHLYFGCRSPHEDYLYQEELENAQSEGIITLHTAFSRMPNQPKTYVQHVMEQDGKKLIELLDQGAHFYICGDGSQMAPAVEATLMKSYADVHQVSEADARLWLQQLEEKGRYAKDVWAG

SEQ ID NO: 27 - DNA, 3147 bp, synthetic construct
  misc_feature 1..3147: note = Variant of cytochrome P450
  source 1..3147: mol_type = other DNA
atgacaataaaggaaatgccgcagccgaaaacgtttggagaacttaaaaatttaccgttattaaacacagataaaccggttcaagctttgatgcgtattgcggatgaattaggagaaatctttaaattcgaggcgcctggtagcgtaacgcgctttttatcaagtcagcgtctaattaaagaagcatgcgatgaatcacgctttgataaaaacttaagtcaagcgcttaaatttgcacgtgattttcttggagacgggttatttacaagctggacgcatgaaccgaattggaaaaaagcgcataatatcttactgccaagctttagtcagcgtgcaatgaaacgttatcatgcgatgatggtcgatatcgccgtgcagcttgttcaaaagtgggagcgtctaaatgcagatgagcatattgaagtatcggaagacatgacacgtttaacgcttgatacaattggtctttgcggctttaactatcgctttaacagcttttaccgagatcagcctcatccatttattgtgagtatggtccgtgcactggatgaagtaatgaacaagctgcagcgagcaaatccagacgacccagcttatgatgaaaacaagcgccagtgtcaagaagatatcaaggtgatgaacgactatgtagataaaattattgcagatcgcaaagcaaggggtgaacaaagccatgatttattaacgcagatgctaaacggaaaagatccagaaacgggtgagccgcttgatgacgggaacattcgttatcaaattattacattcttaattgcgggacacgaaacaacaagtggtcttttatcatttgcgctgtatttcttagtgaaaaatccacatgtattacaaaaagtagcagaagaagcagcacgagttctagtagatcctgttccaagctacaaacaagtcaaacagcttaaatatgtcggcatggtcttaaacgaagcgctgcgcttatggccaactgctcctgcgttttccctatatgcaaaagaagatacggtgcttggaggagaatatcctttaaccaaaggcgacgaagtaatggttctgattcctcagcttcaccgtgataaaacaatttggggagacgatgtggaggagttccgtccagagcgttttgaaaatccaagtgcgattccgcagcatgcgtttaaaccgtttggaaacggtcagcgtgcgtgtatcggtcagcagttcgctcttcatgaagcaacgctggtacttggtatgatgctaaaacactttgactttgaagatcatacaaactacgagctcaagattaaagaaactttaacgttaaaacctgaaggctttgtggtaaaagcaaaatcgaaaaaaattccgcttggcggtattccttcacctagcactgaacagtctgctaaaaaagtacgcaaaaaggcagaaaacgctcataatacgccgctgcttgtgctatacggttcaaatgcgggaacagctgaaggaacggcgcgtgatttagcagatattgcaatgagcaaaggatttgcaccgcaggtcgcaacgcttgattcacacgccggaaatcttccgcgcgaaggagctgtattaattgtaacggcgtcttataacggtcatccgcctgataacgcaaagcaatttgtccgctggttagaccaagcgtctgctgatgaagtaaaaggcgttcgctactccgtatttggatgcggcgataaaacctgggctgcgacgtatcaaaaagtgcctgcttttatcgatgaaacgcttgccgctaaaggggcagaaaacatcgctgaccgcggtgaagcagatgcaagcgacgactttgaaggcacatatgaagaatggcgtgatcatatgtggagtgacgtagcagcctactttaacctcgacattgaaaacagtgaagataataaatctactctttcacttcaatttgtcgacagcgccgcggatatgccgcttgcgaaaatgcacggtgcgttttcaacgaacgtcgtagcaagcaaagaacttcaacagccaggcagtgcacgaagcacgcgacatcttgaaattgaacttccaaaagaagcttcttatcaagaaggagatcatttaggtgttattcctcgcaactatgaaggaatagtaaaccgtgtaacagcaaggttcggcctaagcgcatcacagcaaatccgtctggaagcagaagaagaaaaattagctcatttgccactcgctaaaacagtatccgtagaagagcttctgcaatacgtggagcttcaagatcctgttacgcgcacgcagcttcgcgcaatggctgctaaaacggtctgcccgccgcataaagtagagcttgaagccttgcttgaaaagcaagcctacaaagaacaagtgctggcaaaacgtttaacaatgcttgaactgcttgaaaaatacccggcgtgtgaaatgaaattcagcgaatttatcgcccttctgccaagcatccgcccgcgctattactcgatttcttcatcacctcgtgtcgatgaaaaacaagcaagcatcacggtcagcgttgtctcaggaccggcgtggagcggatatggagaatataaaggaattgcgtcgaactatcttgccgagctgcaagaaggagatacgattacgtgctttatttccacaccgcagtcagaatttacgctgccaaaagaccctgaaacgccgcttatcatggtcggaccgggaacaggcgtcgcgccgtttagaggctttgtgcaggcgcgcaaacagctaaaagaacaaggacagtcacttggagaagcacatttatacttcggctgccgttcacctcatgaagactatctgtatcaagaagagcttgaaaacgcccaaagcgaaggcatcattacgcttcataccgctttttctcgcatgccaaatcagccgaaaacatacgttcagcacgtaatggaacaagacggcaagaaattgattgaacttcttgatcaaggagcgcacttctatatttgcggagacggaagccaaatggcacctgccgttgaagcaacgcttatgaaaagctatgctgacgttcaccaagtgagtgaagcagacgctcgcttatggctgcagcagctagaagaaaaaggccgatacgcaaaagacgtgtgggctggg

SEQ ID NO: 28 - protein, 1049 aa, synthetic construct
  REGION 1..1049: note = Variant of cytochrome P450
MTIKEMPQPKTFGELKNLPLLNTDKPVQALMRIADELGEIFKFEAPGSVTRFLSSQRLIKEACDESRFDKNLSQALKFARDFLGDGLFTSWTHEPNWKKAHNILLPSFSQRAMKRYHAMMVDIAVQLVQKWERLNADEHIEVSEDMTRLTLDTIGLCGFNYRFNSFYRDQPHPFIVSMVRALDEVMNKLQRANPDDPAYDENKRQCQEDIKVMNDYVDKIIADRKARGEQSHDLLTQMLNGKDPETGEPLDDGNIRYQIITFLIAGHETTSGLLSFALYFLVKNPHVLQKVAEEAARVLVDPVPSYKQVKQLKYVGMVLNEALRLWPTAPAFSLYAKEDTVLGGEYPLTKGDEVMVLIPQLHRDKTIWGDDVEEFRPERFENPSAIPQHAFKPFGNGQRACIGQQFALHEATLVLGMMLKHFDFEDHTNYELKIKETLTLKPEGFVVKAKSKKIPLGGIPSPSTEQSAKKVRKKAENAHNTPLLVLYGSNAGTAEGTARDLADIAMSKGFAPQVATLDSHAGNLPREGAVLIVTASYNGHPPDNAKQFVRWLDQASADEVKGVRYSVFGCGDKTWAATYQKVPAFIDETLAAKGAENIADRGEADASDDFEGTYEEWRDHMWSDVAAYFNLDIENSEDNKSTLSLQFVDSAADMPLAKMHGAFSTNVVASKELQQPGSARSTRHLEIELPKEASYQEGDHLGVIPRNYEGIVNRVTARFGLSASQQIRLEAEEEKLAHLPLAKTVSVEELLQYVELQDPVTRTQLRAMAAKTVCPPHKVELEALLEKQAYKEQVLAKRLTMLELLEKYPACEMKFSEFIALLPSIRPRYYSISSSPRVDEKQASITVSVVSGPAWSGYGEYKGIASNYLAELQEGDTITCFISTPQSEFTLPKDPETPLIMVGPGTGVAPFRGFVQARKQLKEQGQSLGEAHLYFGCRSPHEDYLYQEELENAQSEGIITLHTAFSRMPNQPKTYVQHVMEQDGKKLIELLDQGAHFYICGDGSQMAPAVEATLMKSYADVHQVSEADARLWLQQLEEKGRYAKDVWAG

SEQ ID NO: 29 - DNA, 3147 bp, synthetic construct
  misc_feature 1..3147: note = Variant of cytochrome P450
  source 1..3147: mol_type = other DNA
atgacaataaaggaaatgccgcagccgaaaacgtttggagaacttaaaaatttaccgttattaaacacagataaaccggttcaagctttgatgcgtattgcggatgaattaggagaaatctttaaattcgaggcgcctggtagcgtaacgcgctttttatcaagtcagcgtctaattaaagaagcatgcgatgaatcacgctttgataaaaacttaagtcaagggcttaaatttgcacgtgattttcttggagacgggttatttacaagctggacgcatgaaccgaattggaaaaaagcgcataatatcttacttccaagctttagtcagcgtgcaatgaaacgttatcatgcgatgatggtcgatatcgccgtgcagcttgttcaaaagtgggagcgtctaaatgcagatgagcatattgaagtatcggaagacatgacacgtttaacgcttgatacaattggtctttgcggctttaactatcgctttaacagcttttaccgagatcagcctcatccatttattgtgagtatggtccgtgcactggatgaagtaatgaacaagctgcagcgagcaaatccagacgacccagcttatgatgaaaacaagcgccagtgtcaagaagatatcaaggtgatgaacgactatgtagataaaattattgcagatcgcaaagcaaggggtgaacaaagccatgatttattaacgcagatgctaaacggaaaagatccagaaacgggtgagccgcttgatgacgggaacattagctatcaaattattacattcttaattgcgggacacgaaacaacaagtggtcttttatcatttgcgctgtatttcttagtgaaaaatccacatgtattacaaaaagtagcagaagaagcagcacgagttctagtagatcctgttccaagctacaaacaagtcaaacagcttaaatatgtcggcatggtcttaaacgaagcgctgcgcttatggccaactgctcctgcgttttccctatatgcaaaagaagatacggtgcttggaggagaatatcctttaaccaaaggcgacgaagtaatggttctgattcctcagcttcaccgtgataaaacaatttggggagacgatgtggaggagttccgtccagagcgttttgaaaatccaagtgcgattccgcagcatgcgtttaaaccgtttggaaacggtcagcgtgcgtgtatcggtcagcagttcgctcttcatgaagcaacgctggtacttggtatgatgctaaaacactttgactttgaagatcatacaaactacgagctcgatattaaagaaactttaacgttaaaacctgaaggctttgtggtaaaagcaaaatcgaaaaaaattccgcttggcggtattccttcacctagcactgaacagtctgctaaaaaagtacgcaaaaaggcagaaaacgctcataatacgccgctgcttgtgctatacggttcaaatgcgggaacagctgaaggaacggcgcgtgatttagcagatattgcaatgagcaaaggatttgcaccgcaggtcgcaacgcttgattcacacgccggaaatcttccgcgcgaaggagctgtattaattgtaacggcgtcttataacggtcatccgcctgataacgcaaagcaatttgtcgactggttagaccaagcgtctgctgatgaagtaaaaggcgttcgctactccgtatttggatgcggcgataaaaactgggctgcgacgtatcaaaaagtgcctgcttttatcgatgaaacgcttgccgctaaaggggcagaaaacatcgctgaccgcggtgaagcagatgcaggcgacgactttgaaggcacatatgaagaatggcgtgatcatatgtggagtgacgtagcagcctactttaacctcgacattgaaaacagtgaagataataaatctactctttcacttcaatttgtcgacagcgccgcggatatgccgcttgcgaaaatgcacggtgcgttttcaacgaacgtcgtagcaagcaaagaacttcaacagccaggcagtgcacgaagcacgcgacatcttgaaattgaacttccaaaagaagcttcttatcaagaaggagatcatttaggtgttattcctcgcaactatgaaggaatagtaaaccgtgtaacagcaaggttcggcctaagcgcatcacagcaaatccgtctggaagcagaagaagaaaaattagctcatttgccactcgctaaaacagtatccgtagaagagcttctgcaatacgtggagcttcaagatcctgttacgcgcacgcagcttcgcgcaatggctgctaaaacggtctgcccgccgcataaagtagagcttgaagccttgcttgaaaagcaagcctacaaagaacaagtgctggcaaaacgtttaacaatgcttgaactgcttgaaaaatacccggcgtgtgaaatgaaattcagcgaatttatcgcccttctgccaagcatacgcccgcgctattactcgatttcttcatcacctcgtgtcgatgaaaaacaagcaagcatcacggtcagcgttgtctcaggagaagcgtggagcggatatggagaatataaaggaattgcgtcgaactatcttgccgagctgcaagaaggagatacgattacgtgctttatttccacaccgcagtcagaatttacgctgccaaaagaccctgaaacgccgcttatcatggtcggaccgggaacaggcgtcgcgccgtttagaggctttgtgcaggcgcgcaaacagctaaaagaacaaggacagtcacttggagaagcacatttatacttcggctgccgttcacctcatgaagactatctgtatcaagaagagcttgaaaacgcccaaagcgaaggcatcattacgcttcataccgctttttctcgcatgccaaatcagccgaaaacatacgttcagcacgtaatggaacaagacggcaagaaattgattgaacttcttgatcaaggagcgcacttctatatttgcggagacggaagccaaatggcacctgccgttgaagcaacgcttatgaaaagctatgctgacgttcaccaagtgagtgaagcagacgctcgcttatggctgcagcagctagaagaaaaaggccgatacgcaaaagacgtgtgggctggg

SEQ ID NO: 30 - protein, 1049 aa, synthetic construct
  REGION 1..1049: note = Variant of cytochrome P450
MTIKEMPQPKTFGELKNLPLLNTDKPVQALMRIADELGEIFKFEAPGSVTRFLSSQRLIKEACDESRFDKNLSQGLKFARDFLGDGLFTSWTHEPNWKKAHNILLPSFSQRAMKRYHAMMVDIAVQLVQKWERLNADEHIEVSEDMTRLTLDTIGLCGFNYRFNSFYRDQPHPFIVSMVRALDEVMNKLQRANPDDPAYDENKRQCQEDIKVMNDYVDKIIADRKARGEQSHDLLTQMLNGKDPETGEPLDDGNISYQIITFLIAGHETTSGLLSFALYFLVKNPHVLQKVAEEAARVLVDPVPSYKQVKQLKYVGMVLNEALRLWPTAPAFSLYAKEDTVLGGEYPLTKGDEVMVLIPQLHRDKTIWGDDVEEFRPERFENPSAIPQHAFKPFGNGQRACIGQQFALHEATLVLGMMLKHFDFEDHTNYELDIKETLTLKPEGFVVKAKSKKIPLGGIPSPSTEQSAKKVRKKAENAHNTPLLVLYGSNAGTAEGTARDLADIAMSKGFAPQVATLDSHAGNLPREGAVLIVTASYNGHPPDNAKQFVDWLDQASADEVKGVRYSVFGCGDKNWAATYQKVPAFIDETLAAKGAENIADRGEADAGDDFEGTYEEWRDHMWSDVAAYFNLDIENSEDNKSTLSLQFVDSAADMPLAKMHGAFSTNVVASKELQQPGSARSTRHLEIELPKEASYQEGDHLGVIPRNYEGIVNRVTARFGLSASQQIRLEAEEEKLAHLPLAKTVSVEELLQYVELQDPVTRTQLRAMAAKTVCPPHKVELEALLEKQAYKEQVLAKRLTMLELLEKYPACEMKFSEFIALLPSIRPRYYSISSSPRVDEKQASITVSVVSGEAWSGYGEYKGIASNYLAELQEGDTITCFISTPQSEFTLPKDPETPLIMVGPGTGVAPFRGFVQARKQLKEQGQSLGEAHLYFGCRSPHEDYLYQEELENAQSEGIITLHTAFSRMPNQPKTYVQHVMEQDGKKLIELLDQGAHFYICGDGSQMAPAVEATLMKSYADVHQVSEADARLWLQQLEEKGRYAKDVWAG

SEQ ID NO: 31 - DNA, 3147 bp, synthetic construct
  misc_feature 1..3147: note = Variant of cytochrome P450
  source 1..3147: mol_type = other DNA
atgacaataaaggaaatgccgcagccgaaaacgtttggagaacttaaaaatttaccgttattaaacacagataaaccggttcaagctttgatgcgtattgcggatgaattaggagaaatctttaaattcgaggcgcctggtagcgtaacgcgctttttatcaagtcagcgtctaattaaagaagcatgcgatgaatcacgctttgataaaaacttaagtcaagcgcttaaatttgcacgtgattttcttggagacgggttatttacaagctggacgcatgaaccgaattggaaaaaagcgcataatatcttacttccaagctttagtcagcgtgcaatgaaacgttatcatgcgatgatggtcgatatcgccgtgcagcttgttcaaaagtgggagcgtctaaatgcagatgagcatattgaagtatcggaagacatgacacgtttaacgacggatacaattggtctttgcggctttaactatcgctttaacagcttttaccgagatcagcctcatccatttattgtgagtatggtccgtgcactggatgaagtaatgaacaagctgcagcgagcaaatccagacgacccagcttatgatgaaaacaagcgccagtgtcaagaagatatcaaggtgatgaacgactatgtagataaaattattgcagatcgcaaagcaaggggtgaacaaagccatgatttattaacgcagatgctaaacggaaaagatccagaaacgggtgagccgcttgatgacgggaacattagctatcaaattattacattcttaattgcgggacacgaaacaacaagtggtcttttatcatttgcgctgtatttcttagtgaaaaatccacatgtattacaaaaagtagcagaagaagcagcacgagttctagtagatcctgttccaagctacaaacaagtcaaacagcttaaatatgtcggcatggtcttaaacgaagcgctgcgcttatggccaactgctcctgcgttttccctatatgcaaaagaagatacggtgcttggaggagaatatcctttaaccaaaggcgacgaagtaatggttctgattcctcagcttcaccgtgataaaacaatttggggagacgatgtggaggagttccgtccagagcgttttgaaaatccaagtgcgattccgcagcatgcgtttaaaccgtttggaaacggtcagcgtgcgtgtatcggtcagcagttcgctcttcatgaagcaacgctggtacttggtatgatgctaaaacactttgactttgaagatcatacaaactacgagctcgatattaaagaaactttaacgttaaaacctgaaggctttgtggtaaaagcaaaatcgaaaaaaattccgcttggcggtattccttcacctagcactgaacagtctgctaaaaaagtacgcaaaaaggcagaaaacgctcataatacgccgctgcttgtgctatacggttcaaatgcgggaacagctgaaggaacggcgcgtgatttagcagatattgcaatgagcaaaggatttgcaccgcaggtcgcaacgcttgattcacacgccggaaatcttccgcgcgaaggagctgtattaattgtaacggcgtcttataacggtcatccgcctgataacgcaaagcaatttgtcgactggttagaccaagcgtctgctgatgaagtaaaaggcgttcgctactccgtatttggatgcggcgataaaaactgggctgcgacgtatcaaaaagtgcctgcttttatcgatgaaacgcttgccgctaaaggggcagaaaacatcgctgaccgcggtgaagcagatgcaagcgacgactttgaaggcacatatgaagaatggcgtgatcatatgtggagtgacgtagcagcctactttaacctcgacattgaaaacagtgaagataataaatctactctttcacttcaatttgtcgacagcgccgcggatatgccgcttgcgaaaatgcacggtgcgttttcaacgaacgtcgtagcaagcaaagaacttcaacagccaggcagtgcacgaagcacgcgacatcttgaaattgaacttccaaaagaagcttcttatcaagaaggagatcatttaggtgttattcctcgcaactatgaaggaatagtaaaccgtgtaacagcaaggttcggcctaagcgcatcacagcaaatccgtctggaagcagaagaagaaaaattagctcatttgccactcgctaaaacagtatccgtagaagagcttctgcaatacgtggagcttcaagatcctgttacgcgcacgcagcttcgcgcaatggctgctaaaacggtctgcccgccgcataaagtagagcttgaagccttgcttgaaaagcaagcctacaaagaacaagtgctggcaaaacgtttaacaatgcttgaactgcttgaaaaatacccggcgtgtgaaatgaaattcagcgaatttatcgcccttctgccaagcatacgcccgcgctattactcgatttcttcatcacctcgtgtcgatgaaaaacaagcaagcatcacggtcagcgttgtctcaggagaagcgtggagcggatatggagaatataaaggaattgcgtcgaactatcttgccgagctgcaagaaggagatacgattacgtgctttatttccacaccgcagtcagaatttacgctgccaaaagaccctgaaacgccgcttatcatggtcggaccgggaacaggcgtcgcgccgtttagaggctttgtgcaggcgcgcaaacagctaaaagaacaaggacagtcacttggagaagcacatttatacttcggctgccgttcacctcatgaagactatctgtatcaagaagagcttgaaaacgcccaaagcgaaggcatcattacgcttcataccgctttttctcgcatgccaaatcagccgaaaacatacgttcagcacgtaatggaacaagacggcaagaaattgattgaacttcttgatcaaggagcgcacttctatatttgcggagacggaagccaaatggcacctgccgttgaagcaacgcttatgaaaagctatgctgacgttcaccaagtgagtgaagcagacgctcgcttatggctgcagcagctagaagaaaaaggccgatacgcaaaagacgtgtgggctggg

SEQ ID NO: 32 - protein, 1049 aa, synthetic construct
  REGION 1..1049: note = Variant of cytochrome P450
MTIKEMPQPKTFGELKNLPLLNTDKPVQALMRIADELGEIFKFEAPGSVTRFLSSQRLIKEACDESRFDKNLSQALKFARDFLGDGLFTSWTHEPNWKKAHNILLPSFSQRAMKRYHAMMVDIAVQLVQKWERLNADEHIEVSEDMTRLTTDTIGLCGFNYRFNSFYRDQPHPFIVSMVRALDEVMNKLQRANPDDPAYDENKRQCQEDIKVMNDYVDKIIADRKARGEQSHDLLTQMLNGKDPETGEPLDDGNISYQIITFLIAGHETTSGLLSFALYFLVKNPHVLQKVAEEAARVLVDPVPSYKQVKQLKYVGMVLNEALRLWPTAPAFSLYAKEDTVLGGEYPLTKGDEVMVLIPQLHRDKTIWGDDVEEFRPERFENPSAIPQHAFKPFGNGQRACIGQQFALHEATLVLGMMLKHFDFEDHTNYELDIKETLTLKPEGFVVKAKSKKIPLGGIPSPSTEQSAKKVRKKAENAHNTPLLVLYGSNAGTAEGTARDLADIAMSKGFAPQVATLDSHAGNLPREGAVLIVTASYNGHPPDNAKQFVDWLDQASADEVKGVRYSVFGCGDKNWAATYQKVPAFIDETLAAKGAENIADRGEADASDDFEGTYEEWRDHMWSDVAAYFNLDIENSEDNKSTLSLQFVDSAADMPLAKMHGAFSTNVVASKELQQPGSARSTRHLEIELPKEASYQEGDHLGVIPRNYEGIVNRVTARFGLSASQQIRLEAEEEKLAHLPLAKTVSVEELLQYVELQDPVTRTQLRAMAAKTVCPPHKVELEALLEKQAYKEQVLAKRLTMLELLEKYPACEMKFSEFIALLPSIRPRYYSISSSPRVDEKQASITVSVVSGEAWSGYGEYKGIASNYLAELQEGDTITCFISTPQSEFTLPKDPETPLIMVGPGTGVAPFRGFVQARKQLKEQGQSLGEAHLYFGCRSPHEDYLYQEELENAQSEGIITLHTAFSRMPNQPKTYVQHVMEQDGKKLIELLDQGAHFYICGDGSQMAPAVEATLMKSYADVHQVSEADARLWLQQLEEKGRYAKDVWAG

SEQ ID NO: 33 - DNA, 3147 bp, synthetic construct
  misc_feature 1..3147: note = Variant of cytochrome P450
  source 1..3147: mol_type = other DNA
atgacaataaaggaaatgccgcagccgaaaacgtttggagaacttaaaaatttaccgttattaaacacagataaaccggttcaagctttgatgcgtattgcggatgaattaggagaaatctttaaattcgaggcgcctggtagcgtaacgcgctttttatcaagtcagcgtctaattaaagaagcatgcgatgaatcacgctttgataaaaacttaagtcaagcgcttaaatttgcacgtgattttcttggagacgggttatttacaagctggacgcatgaaccgaattggaaaaaagcgcataatatcttacttccaagctttagtcagcgtgcaatgaaacgttatcatgcgatgatggtcgatatcgccgtgcagcttgttcaaaagtgggagcgtctaaatgcagatgagcatattgaagtatcggaagacatgacacgtttaacgcttgatacaattggtctttgcggcatgaactatcgctttaacagcttttaccgagatcagcctcatccatttattgtgagtatggtccgtgcactggatgaagtaatgaacaagctgcagcgagcaaatccagacgacccagcttatgatgaaaacaagcgccagtgtcaagaagatatcaaggtgatgaacgactatgtagataaaattattgcagatcgcaaagcaaggggtgaacaaagccatgatttattaacgcagatgctaaacggaaaagatccagaaacgggtgagccgcttgatgacgggaacattagctatcaaattattacattcttaattgcgggacacgaaacaacaagtggtcttttatcatttgcgctgtatttcttagtgaaaaatccacatgtattacaaaaagtagcagaagaagcagcacgagttctagtagatcctgttccaagctacaaacaagtcaaacagcttaaatatgtcggcatggtcttaaacgaagcgctgcgcttatggccaactgctcctgcgttttccctatatgcaaaagaagatacggtgcttggaggagaatatcctttaaccaaaggcgacgaagtaatggttctgattcctcagcttcaccgtgataaaacaatttggggagacgatgtggaggagttccgtccagagcgttttgaaaatccaagtgcgattccgcagcatgcgtttaaaccgtttggaaacggtcagcgtgcgtgtatcggtcagcagttcgctcttcatgaagcaacgctggtacttggtatgatgctaaaacactttgactttgaagatcatacaaactacgagctcgatattaaagaaactttaacgttaaaacctgaaggctttgtggtaaaagcaaaatcgaaaaaaattccgcttggcggtattccttcacctagcactgaacagtctgctaaaaaagtacgcaaaaaggcagaaaacgctcataatacgccgctgcttgtgctatacggttcaaatgcgggaacagctgaaggaacggcgcgtgatttagcagatattgcaatgagcaaaggatttgcaccgcaggtcgcaacgcttgattcacacgccggaaatcttccgcgcgaaggagctgtattaattgtaacggcgtcttataacggtcatccgcctgataacgcaaagcaatttgtcgactggttagaccaagcgtctgctgatgaagtaaaaggcgttcgctactccgtatttggatgcggcgataaaaactgggctgcgacgtatcaaaaagtgcctgcttttatcgatgaaacgcttgccgctaaaggggcagaaaacatcgctgaccgcggtgaagcagatgcaagcgacgactttgaaggcacatatgaagaatggcgtgatcatatgtggagtgacgtagcagcctactttaacctcgacattgaaaacagtgaagataataaatctactctttcacttcaatttgtcgacagcgccgcggatatgccgcttgcgaaaatgcacggtgcgttttcaacgaacgtcgtagcaagcaaagaacttcaacagccaggcagtgcacgaagcacgcgacatcttgaaattgaacttccaaaagaagcttcttatcaagaaggagatcatttaggtgttattcctcgcaactatgaaggaatagtaaaccgtgtaacagcaaggttcggcctaagcgcatcacagcaaatccgtctggaagcagaagaagaaaaattagctcatttgccactcgctaaaacagtatccgtagaagagcttctgcaatacgtggagcttcaagatcctgttacgcgcacgcagcttcgcgcaatggctgctaaaacggtctgcccgccgcataaagtagagcttgaagccttgcttgaaaagcaagcctacaaagaacaagtgctggcaaaacgtttaacaatgcttgaactgcttgaaaaatacccggcgtgtgaaatgaaattcagcgaatttatcgcccttctgccaagcatacgcccgcgctattactcgatttcttcatcacctcgtgtcgatgaaaaacaagcaagcatcacggtcagcgttgtctcaggagaagcgtggagcggatatggagaatataaaggaattgcgtcgaactatcttgccgagctgcaagaaggagatacgattacgtgctttatttccacaccgcagtcagaatttacgctgccaaaagaccctgaaacgccgcttatcatggtcggaccgggaacaggcgtcgcgccgtttagaggctttgtgcaggcgcgcaaacagctaaaagaacaaggacagtcacttggagaagcacatttatacttcggctgccgttcacctcatgaagactatctgtatcaagaagagcttgaaaacgcccaaagcgaaggcatcattacgcttcataccgctttttctcgcatgccaaatcagccgaaaacatacgttcagcacgtaatggaacaagacggcaagaaattgattgaacttcttgatcaaggagcgcacttctatatttgcggagacggaagccaaatggcacctgccgttgaagcaacgcttatgaaaagctatgctgacgttcaccaagtgagtgaagcagacgctcgcttatggctgcagcagctagaagaaaaaggccgatacgcaaaagacgtgtgggctggg

SEQ ID NO: 34 - protein, 1049 aa, synthetic construct
  REGION 1..1049: note = Variant of cytochrome P450
MTIKEMPQPKTFGELKNLPLLNTDKPVQALMRIADELGEIFKFEAPGSVTRFLSSQRLIKEACDESRFDKNLSQALKFARDFLGDGLFTSWTHEPNWKKAHNILLPSFSQRAMKRYHAMMVDIAVQLVQKWERLNADEHIEVSEDMTRLTLDTIGLCGMNYRFNSFYRDQPHPFIVSMVRALDEVMNKLQRANPDDPAYDENKRQCQEDIKVMNDYVDKIIADRKARGEQSHDLLTQMLNGKDPETGEPLDDGNISYQIITFLIAGHETTSGLLSFALYFLVKNPHVLQKVAEEAARVLVDPVPSYKQVKQLKYVGMVLNEALRLWPTAPAFSLYAKEDTVLGGEYPLTKGDEVMVLIPQLHRDKTIWGDDVEEFRPERFENPSAIPQHAFKPFGNGQRACIGQQFALHEATLVLGMMLKHFDFEDHTNYELDIKETLTLKPEGFVVKAKSKKIPLGGIPSPSTEQSAKKVRKKAENAHNTPLLVLYGSNAGTAEGTARDLADIAMSKGFAPQVATLDSHAGNLPREGAVLIVTASYNGHPPDNAKQFVDWLDQASADEVKGVRYSVFGCGDKNWAATYQKVPAFIDETLAAKGAENIADRGEADASDDFEGTYEEWRDHMWSDVAAYFNLDIENSEDNKSTLSLQFVDSAADMPLAKMHGAFSTNVVASKELQQPGSARSTRHLEIELPKEASYQEGDHLGVIPRNYEGIVNRVTARFGLSASQQIRLEAEEEKLAHLPLAKTVSVEELLQYVELQDPVTRTQLRAMAAKTVCPPHKVELEALLEKQAYKEQVLAKRLTMLELLEKYPACEMKFSEFIALLPSIRPRYYSISSSPRVDEKQASITVSVVSGEAWSGYGEYKGIASNYLAELQEGDTITCFISTPQSEFTLPKDPETPLIMVGPGTGVAPFRGFVQARKQLKEQGQSLGEAHLYFGCRSPHEDYLYQEELENAQSEGIITLHTAFSRMPNQPKTYVQHVMEQDGKKLIELLDQGAHFYICGDGSQMAPAVEATLMKSYADVHQVSEADARLWLQQLEEKGRYAKDVWAG

SEQ ID NO: 35 - DNA, 3147 bp, synthetic construct
  misc_feature 1..3147: note = Variant of cytochrome P450
  source 1..3147: mol_type = other DNA
atgacaataaaggaaatgccgcagccgaaaacgtttggagaacttaaaaatttaccgttattaaacacagataaaccggttcaagctttgatgcgtattgcggatgaattaggagaaatctttaaattcgaggcgcctggtagcgtaacgcgctttttatcaagtcagcgtctaattaaagaagcatgcgatgaatcacgctttgataaaaacttaagtcaagcgcttaaatttgcacgtgattttcttggagacgggttatttacaagctggacgcatgaaccgaattggaaaaaagcgcataatatcttacttccaagctttagtcagcgtgcaatgaaacgttatcatgcgatgatggtcgatatcgccgtgcagcttgttcaaaagtgggagcgtctaaatgcagatgagcatattgaagtatcggaagacatgacacgtttaacgcttgatacaattggtctttgcggctttaactatcgctttaacagcttttaccgagatcagcctcatccatttattgtgagtatggtccgtgcactggatgaagtaatgaacaagctgcagcgagcaaatccagacgacccagcttatgatgaaaacaagcgccagtgtcaagaagatatcaaggtgatgaacgactatgtagataaaattattgcagatcgcaaagcaaggggtgaacaaagccatgatttattaacgcagatgctaaacggaaaagatccagaaacgggtgagccgcttgatgacgggaacattagctatcaaattattacattcttaattgcgggacacgaaacaacaagtggtcttttatcatttgcgctgtatttcttagtgaaaaatccacatgtattacaaaaagtagcagaagaagcagcacgagttctagtagatcctgttccaagctacaaacaagtcaaacagcttaaatatgtcggcatggtcttaaacgaagcgctgcgcttatggccaactgctcctgcgtttccgctatatgcaaaagaagatacggtgcttggaggagaatatcctttaaccaaaggcgacgaagtaatggttctgattcctcagcttcaccgtgataaaacaatttggggagacgatgtggaggagttccgtccagagcgttttgaaaatccaagtgcgattccgcagcatgcgtttaaaccgtttggaaacggtcagcgtgcgtgtatcggtcagcagttcgctcttcatgaagcaacgctggtacttggtatgatgctaaaacactttgactttgaagatcatacaaactacgagctcgatattaaagaaactttaacgttaaaacctgaaggctttgtggtaaaagcaaaatcgaaaaaaattccgcttggcggtattccttcacctagcactgaacagtctgctaaaaaagtacgcaaaaaggcagaaaacgctcataatacgccgctgcttgtgctatacggttcaaatgcgggaacagctgaaggaacggcgcgtgatttagcagatattgcaatgagcaaaggatttgcaccgcaggtcgcaacgcttgattcacacgccggaaatcttccgcgcgaaggagctgtattaattgtaacggcgtcttataacggtcatccgcctgataacgcaaagcaatttgtcgactggttagaccaagcgtctgctgatgaagtaaaaggcgttcgctactccgtatttggatgcggcgataaaaactgggctgcgacgtatcaaaaagtgcctgcttttatcgatgaaacgcttgccgctaaaggggcagaaaacatcgctgaccgcggtgaagcagatgcaagcgacgactttgaaggcacatatgaagaatggcgtgatcatatgtggagtgacgtagcagcctactttaacctcgacattgaaaacagtgaagataataaatctactctttcacttcaatttgtcgacagcgccgcggatatgccgcttgcgaaaatgcacggtgcgttttcaacgaacgtcgtagcaagcaaagaacttcaacagccaggcagtgcacgaagcacgcgacatcttgaaattgaacttccaaaagaagcttcttatcaagaaggagatcatttaggtgttattcctcgcaactatgaaggaatagtaaaccgtgtaacagcaaggttcggcctaagcgcatcacagcaaatccgtctggaagcagaagaagaaaaattagctcatttgccactcgctaaaacagtatccgtagaagagcttctgcaatacgtggagcttcaagatcctgttacgcgcacgcagcttcgcgcaatggctgctaaaacggtctgcccgccgcataaagtagagcttgaagccttgcttgaaaagcaagcctacaaagaacaagtgctggcaaaacgtttaacaatgcttgaactgcttgaaaaatacccggcgtgtgaaatgaaattcagcgaatttatcgcccttctgccaagcatacgcccgcgctattactcgatttcttcatcacctcgtgtcgatgaaaaacaagcaagcatcacggtcagcgttgtctcaggagaagcgtggagcggatatggagaatataaaggaattgcgtcgaactatcttgccgagctgcaagaaggagatacgattacgtgctttatttccacaccgcagtcagaatttacgctgccaaaagaccctgaaacgccgcttatcatggtcggaccgggaacaggcgtcgcgccgtttagaggctttgtgcaggcgcgcaaacagctaaaagaacaaggacagtcacttggagaagcacatttatacttcggctgccgttcacctcatgaagactatctgtatcaagaagagcttgaaaacgcccaaagcgaaggcatcattacgcttcataccgctttttctcgcatgccaaatcagccgaaaacatacgttcagcacgtaatggaacaagacggcaagaaattgattgaacttcttgatcaaggagcgcacttctatatttgcggagacggaagccaaatggcacctgccgttgaagcaacgcttatgaaaagctatgctgacgttcaccaagtgagtgaagcagacgctcgcttatggctgcagcagctagaagaaaaaggccgatacgcaaaagacgtgtgggctggg

SEQ ID NO: 36 - protein, 1049 aa, synthetic construct
  REGION 1..1049: note = Variant of cytochrome P450
MTIKEMPQPKTFGELKNLPLLNTDKPVQALMRIADELGEIFKFEAPGSVTRFLSSQRLIKEACDESRFDKNLSQALKFARDFLGDGLFTSWTHEPNWKKAHNILLPSFSQRAMKRYHAMMVDIAVQLVQKWERLNADEHIEVSEDMTRLTLDTIGLCGFNYRFNSFYRDQPHPFIVSMVRALDEVMNKLQRANPDDPAYDENKRQCQEDIKVMNDYVDKIIADRKARGEQSHDLLTQMLNGKDPETGEPLDDGNISYQIITFLIAGHETTSGLLSFALYFLVKNPHVLQKVAEEAARVLVDPVPSYKQVKQLKYVGMVLNEALRLWPTAPAFPLYAKEDTVLGGEYPLTKGDEVMVLIPQLHRDKTIWGDDVEEFRPERFENPSAIPQHAFKPFGNGQRACIGQQFALHEATLVLGMMLKHFDFEDHTNYELDIKETLTLKPEGFVVKAKSKKIPLGGIPSPSTEQSAKKVRKKAENAHNTPLLVLYGSNAGTAEGTARDLADIAMSKGFAPQVATLDSHAGNLPREGAVLIVTASYNGHPPDNAKQFVDWLDQASADEVKGVRYSVFGCGDKNWAATYQKVPAFIDETLAAKGAENIADRGEADASDDFEGTYEEWRDHMWSDVAAYFNLDIENSEDNKSTLSLQFVDSAADMPLAKMHGAFSTNVVASKELQQPGSARSTRHLEIELPKEASYQEGDHLGVIPRNYEGIVNRVTARFGLSASQQIRLEAEEEKLAHLPLAKTVSVEELLQYVELQDPVTRTQLRAMAAKTVCPPHKVELEALLEKQAYKEQVLAKRLTMLELLEKYPACEMKFSEFIALLPSIRPRYYSISSSPRVDEKQASITVSVVSGEAWSGYGEYKGIASNYLAELQEGDTITCFISTPQSEFTLPKDPETPLIMVGPGTGVAPFRGFVQARKQLKEQGQSLGEAHLYFGCRSPHEDYLYQEELENAQSEGIITLHTAFSRMPNQPKTYVQHVMEQDGKKLIELLDQGAHFYICGDGSQMAPAVEATLMKSYADVHQVSEADARLWLQQLEEKGRYAKDVWAG

SEQ ID NO: 37 - DNA, 3147 bp, synthetic construct
  misc_feature 1..3147: note = Variant of cytochrome P450
  source 1..3147: mol_type = other DNA
atgacaataaaggaaatgccgcagccgaaaacgtttggagaacttaaaaatttaccgttattaaacacagataaaccggttcaagctttgatgcgtattgcggatgaattaggagaaatctttaaattcgaggcgcctggtagcgtaacgcgctttttatcaagtcagcgtctaattaaagaagcatgcgatgaatcacgctttgataaaaacttaagtcaagcgcttaaatttgcacgtgattttcttggagacgggttatttacaagctggacgcatgaaccgaattggaaaaaagcgcataatatcttacttccaagctttagtcagcgtgcaatgaaacgttatcatgcgatgatggtcgatatcgccgtgcagcttgttcaaaagtgggagcgtctaaatgcagatgagcatattgaagtatcggaagacatgaggcgtttaacgcttgatacaattggtctttgcggctttaactatcgctttaacagcttttaccgagatcagcctcatccatttattgtgagtatggtccgtgcactggatgaagtaatgaacaagctgcagcgagcaaatccagacgacccagcttatgatgaaaacaagcgccagtgtcaagaagatatcaaggtgatgaacgactatgtagataaaattattgcagatcgcaaagcaaggggtgaacaaagccatgatttattaacgcagatgctaaacggaaaagatccagaaacgggtgagccgcttgatgacgggaacattagctatcaaattattacattcttaattgcgggacacgaaacaacaagtggtcttttatcatttgcgctgtatttcttagtgaaaaatccacatgtattacaaaaagtagcagaagaagcagcacgagttctagtagatcctgttccaagctacaaacaagtcaaacagcttaaatatgtcggcatggtcttaaacgaagcgctgcgcttatggccaactgctcctgcgttttccctatatgcaaaagaagatacggtgcttggaggagaatatcctttaaccaaaggcgacgaagtaatggttctgattcctcagcttcaccgtgataaaacaatttggggagacgatgtggaggagttccgtccagagcgttttgaaaatccaagtgcgattccgcagcatgcgtttaaaccgtttggaaacggtcagcgtgcgtgtatcggtcagcagttcgctcttcatgaagcaacgctggtacttggtatgatgctaaaacactttgactttgaagatcatacaaactacgagctcgatattaaagaaactttaacgttaaaacctgaaggctttgtggtaaaagcaaaatcgaaaaaaattccgcttggcggtattccttcacctagcactgaacagtctgctaaaaaagtacgcaaaaaggcagaaaacgctcataatacgccgctgcttgtgctatacggttcaaatgcgggaacagctgaaggaacggcgcgtgatttagcagatattgcaatgagcaaaggatttgcaccgcaggtcgcaacgcttgattcacacgccggaaatcttccgcgcgaaggagctgtattaattgtaacggcgtcttataacggtcatccgcctgataacgcaaagcaatttgtcgactggttagaccaagcgtctgctgatgaagtaaaaggcgttcgctactccgtatttggatgcggcgataaaaactgggctgcgacgtatcaaaaagtgcctgcttttatcgatgaaacgcttgccgctaaaggggcagaaaacatcgctgaccgcggtgaagcagatgcaagcgacgactttgaaggcacatatgaagaatggcgtgatcatatgtggagtgacgtagcagcctactttaacctcgacattgaaaacagtgaagataataaatctactctttcacttcaatttgtcgacagcgccgcggatatgccgcttgcgaaaatgcacggtgcgttttcaacgaacgtcgtagcaagcaaagaacttcaacagccaggcagtgcacgaagcacgcgacatcttgaaattgaacttccaaaagaagcttcttatcaagaaggagatcatttaggtgttattcctcgcaactatgaaggaatagtaaaccgtgtaacagcaaggttcggcctaagcgcatcacagcaaatccgtctggaagcagaagaagaaaaattagctcatttgccactcgctaaaacagtatccgtagaagagcttctgcaatacgtggagcttcaagatcctgttacgcgcacgcagcttcgcgcaatggctgctaaaacggtctgcccgccgcataaagtagagcttgaagccttgcttgaaaagcaagcctacaaagaacaagtgctggcaaaacgtttaacaatgcttgaactgcttgaaaaatacccggcgtgtgaaatgaaattcagcgaatttatcgcccttctgccaagcatacgcccgcgctattactcgatttcttcatcacctcgtgtcgatgaaaaacaagcaagcatcacggtcagcgttgtctcaggagaagcgtggagcggatatggagaatataaaggaattgcgtcgaactatcttgccgagctgcaagaaggagatacgattacgtgctttatttccacaccgcagtcagaatttacgctgccaaaagaccctgaaacgccgcttatcatggtcggaccgggaacaggcgtcgcgccgtttagaggctttgtgcaggcgcgcaaacagctaaaagaacaaggacagtcacttggagaagcacatttatacttcggctgccgttcacctcatgaagactatctgtatcaagaagagcttgaaaacgcccaaagcgaaggcatcattacgcttcataccgctttttctcgcatgccaaatcagccgaaaacatacgttcagcacgtaatggaacaagacggcaagaaattgattgaacttcttgatcaaggagcgcacttctatatttgcggagacggaagccaaatggcacctgccgttgaagcaacgcttatgaaaagctatgctgacgttcaccaagtgagtgaagcagacgctcgcttatggctgcagcagctagaagaaaaaggccgatacgcaaaagacgtgtgggctggg

SEQ ID NO: 38 - protein, 1049 aa, synthetic construct
  REGION 1..1049: note = Variant of cytochrome P450
MTIKEMPQPKTFGELKNLPLLNTDKPVQALMRIADELGEIFKFEAPGSVTRFLSSQRLIKEACDESRFDKNLSQALKFARDFLGDGLFTSWTHEPNWKKAHNILLPSFSQRAMKRYHAMMVDIAVQLVQKWERLNADEHIEVSEDMRRLTLDTIGLCGFNYRFNSFYRDQPHPFIVSMVRALDEVMNKLQRANPDDPAYDENKRQCQEDIKVMNDYVDKIIADRKARGEQSHDLLTQMLNGKDPETGEPLDDGNISYQIITFLIAGHETTSGLLSFALYFLVKNPHVLQKVAEEAARVLVDPVPSYKQVKQLKYVGMVLNEALRLWPTAPAFSLYAKEDTVLGGEYPLTKGDEVMVLIPQLHRDKTIWGDDVEEFRPERFENPSAIPQHAFKPFGNGQRACIGQQFALHEATLVLGMMLKHFDFEDHTNYELDIKETLTLKPEGFVVKAKSKKIPLGGIPSPSTEQSAKKVRKKAENAHNTPLLVLYGSNAGTAEGTARDLADIAMSKGFAPQVATLDSHAGNLPREGAVLIVTASYNGHPPDNAKQFVDWLDQASADEVKGVRYSVFGCGDKNWAATYQKVPAFIDETLAAKGAENIADRGEADASDDFEGTYEEWRDHMWSDVAAYFNLDIENSEDNKSTLSLQFVDSAADMPLAKMHGAFSTNVVASKELQQPGSARSTRHLEIELPKEASYQEGDHLGVIPRNYEGIVNRVTARFGLSASQQIRLEAEEEKLAHLPLAKTVSVEELLQYVELQDPVTRTQLRAMAAKTVCPPHKVELEALLEKQAYKEQVLAKRLTMLELLEKYPACEMKFSEFIALLPSIRPRYYSISSSPRVDEKQASITVSVVSGEAWSGYGEYKGIASNYLAELQEGDTITCFISTPQSEFTLPKDPETPLIMVGPGTGVAPFRGFVQARKQLKEQGQSLGEAHLYFGCRSPHEDYLYQEELENAQSEGIITLHTAFSRMPNQPKTYVQHVMEQDGKKLIELLDQGAHFYICGDGSQMAPAVEATLMKSYADVHQVSEADARLWLQQLEEKGRYAKDVWAG

SEQ ID NO: 39 - DNA, 3147 bp, synthetic construct
  misc_feature 1..3147: note = Variant of cytochrome P450
  source 1..3147: mol_type = other DNA
atgacaataaaggaaatgccgcagccgaaaacgtttggagaacttaaaaatttaccgttattaaacacagataaaccggttcaagctttgatgcgtattgcggatgaattaggagaaatctttaaattcgaggcgcctggtagcgtaacgcgctttttatcaagtcagcgtctaattaaagaagcatgcgatgaatcacgctttgataaaaacttaagtcaagcgcttaaatttgcacgtgattttcttggagacgggttatttacaagctggacgcatgaaccgaattggaaaaaagcgcataatatcttactgccaagctttagtcagcgtgcaatgaaacgttatcatgcgatgatggtcgatatcgccgtgcagcttgttcaaaagtgggagcgtctaaatgcagatgagcatattgaagtatcggaagacatgacacgtttaacgcttgatacaattggtctttgcggctttaactatcgctttaacagcttttaccgagatcagcctcatccatttattgtgagtatggtccgtgcactggatgaagtaatgaacaagctgcagcgagcaaatccagacgacccagcttatgatgaaaacaagcgccagtgtcaagaagatatcaaggtgatgaacgactatgtagataaaattattgcagatcgcaaagcaaggggtgaacaaagccatgatttattaacgcagatgctaaacggaaaagatccagaaacgggtgagccgcttgatgacgggaacattcgttatcaaattattacattcttaattgcgggacacgaaacaacaagtggtcttttatcatttgcgctgtatttcttagtgaaaaatccacatgtattacaaaaagtagcagaagaagcagcacgagttctagtagatcctgttccaagctacaaacaagtcaaacagcttaaatatgtcggcatggtcttaaacgaagcgctgcgcttatggccaactgctcctgcgttttccctatatgcaaaagaagatacggtgcttggaggagaatatcctttaaccaaaggcgacgaagtaatggttctgattcctcagcttcaccgtgataaaacaatttggggagacgatgtggaggagttccgtccagagcgttttgaaaatccaagtgcgattccgcagcatgcgtttaaaccgtttggaaacggtcagcgtgcgtgtatcggtcagcagttcgctcttcatgaagcaacgctggtacttggtatgatgctaaaacactttgactttgaagatcatacaaactacgagctcgttattaaagaaactttaacgttaaaacctgaaggctttgtggtaaaagcaaaatcgaaaaaaattccgcttggcggtattccttcacctagcactgaacagtctgctaaaaaagtacgcaaaaaggcagaaaacgctcataatacgccgctgcttgtgctatacggttcaaatgcgggaacagctgaaggaacggcgcgtgatttagcagatattgcaatgagcaaaggatttgcaccgcaggtcgcaacgcttgattcacacgccggaaatcttccgcgcgaaggagctgtattaattgtaacggcgtcttataacggtcatccgcctgataacgcaaagcaatttgtcgactggttagaccaagcgtctgctgatgaagtaaaaggcgttcgctactccgtatttggatgcggcgataaaacctgggctgcgacgtatcaaaaagtgcctcgctttatcgatgaaacgcttgccgctaaaggggcagaaaacatcgctgatcgcggtgaagcagatgcaagcgacgactttgaaggcacatatgaagaatggcgtgatcatatgtggagtgacgtagcagcctactttaacctcgacattgaaaacagtgaagataataaatctactctttcacttcaatttgtcgacagcgccgcggatatgccgcttgcgaaaatgcacggtgcgctgtcaacgaacgtcgtagcaagcaaagaacttcaacagccaggcagtgcacgaagcacgcgacatctggaaattgaacttccaaaagaagcttcttatcaagaaggagatcatttaggtgttattcctcgcaactatgaaggaatagtaaaccgtgtaacagcaaggttcggcctaagcgcatcacagcaaatccgtctggaagcagaagaagaaaaattagctcatttgccactcgctaaaacagtatccgtactggagcttctgcaatacgtggagcttcaagatcctgttacgcgcacgcagcttcgcgcaatggctgctaaaacggtctgcccgccgcataaagtagagcttgaagccttgcttgaaaagcaagcctacaaagaacaagtgctggcaaaacgtttaacaatgcttgaactgcttgaaaaatacccggcgtgtgaaatgaaattcagcgaatttatcgcccttctgccaagcctgcgcccgcgctattactcgatttcttcatcacctcgtgtcgatgaaaaacaagcaagcatcacggtcagcgttgtctcaggagaagcgtggagcggatatggagaatataaaggaattgcgtcgaactatcttgccgagctgcaagaaggagatacgattacgtgctttatttccacaccgcagtcagaatttacgctgccaaaagaccctgaaacgccgcttatcatggtcggaccgggaacaggcgtcgcgccgtttagaggctttgtgcaggcgcgcaaacagctaaaagaacaaggacagtcacttggagaagcacatttatacttcggctgccgttcacctcatgaagactatctgtatcaagaagagcttgaaaacgcccaaagcgaaggcatcattacgcttcataccgctttttctcgcatgccaaatcagccgaaaacatacgttcagcacgtaatggaacaagacggcaagaaattgattgaacttcttgatcaaggagcgcacttctatatttgcggagacggaagccaaatggcacctgccgttgaagcaacgcttatgaaaagctatgctgacgttcaccaagtgagtgaagcagacgctcgcttatggctgcagcagctagaagaaaaaggccgatacgcaaaagacgtgtgggctggg

SEQ ID NO: 40 - protein, 1049 aa, synthetic construct
  REGION 1..1049: note = Variant of cytochrome P450
MTIKEMPQPKTFGELKNLPLLNTDKPVQALMRIADELGEIFKFEAPGSVTRFLSSQRLIKEACDESRFDKNLSQALKFARDFLGDGLFTSWTHEPNWKKAHNILLPSFSQRAMKRYHAMMVDIAVQLVQKWERLNADEHIEVSEDMTRLTLDTIGLCGFNYRFNSFYRDQPHPFIVSMVRALDEVMNKLQRANPDDPAYDENKRQCQEDIKVMNDYVDKIIADRKARGEQSHDLLTQMLNGKDPETGEPLDDGNIRYQIITFLIAGHETTSGLLSFALYFLVKNPHVLQKVAEEAARVLVDPVPSYKQVKQLKYVGMVLNEALRLWPTAPAFSLYAKEDTVLGGEYPLTKGDEVMVLIPQLHRDKTIWGDDVEEFRPERFENPSAIPQHAFKPFGNGQRACIGQQFALHEATLVLGMMLKHFDFEDHTNYELVIKETLTLKPEGFVVKAKSKKIPLGGIPSPSTEQSAKKVRKKAENAHNTPLLVLYGSNAGTAEGTARDLADIAMSKGFAPQVATLDSHAGNLPREGAVLIVTASYNGHPPDNAKQFVDWLDQASADEVKGVRYSVFGCGDKTWAATYQKVPRFIDETLAAKGAENIADRGEADASDDFEGTYEEWRDHMWSDVAAYFNLDIENSEDNKSTLSLQFVDSAADMPLAKMHGALSTNVVASKELQQPGSARSTRHLEIELPKEASYQEGDHLGVIPRNYEGIVNRVTARFGLSASQQIRLEAEEEKLAHLPLAKTVSVLELLQYVELQDPVTRTQLRAMAAKTVCPPHKVELEALLEKQAYKEQVLAKRLTMLELLEKYPACEMKFSEFIALLPSLRPRYYSISSSPRVDEKQASITVSVVSGEAWSGYGEYKGIASNYLAELQEGDTITCFISTPQSEFTLPKDPETPLIMVGPGTGVAPFRGFVQARKQLKEQGQSLGEAHLYFGCRSPHEDYLYQEELENAQSEGIITLHTAFSRMPNQPKTYVQHVMEQDGKKLIELLDQGAHFYICGDGSQMAPAVEATLMKSYADVHQVSEADARLWLQQLEEKGRYAKDVWAG

SEQ ID NO: 41 - DNA, 3147 bp, synthetic construct
  misc_feature 1..3147: note = Variant of cytochrome P450
  source 1..3147: mol_type = other DNA
atgacaataaaggaaatgccgcagccgaaaacgtttggagaacttaaaaatttaccgttattaaacacagataaaccggttcaagctttgatgcgtattgcggatgaattaggagaaatctttaaattcgaggcgcctggtagcgtaacgcgctttttatcaagtcagcgtctaattaaagaagcatgcgatgaatcacgctttgataaaaacttaagtcaagcgcttaaatttgcacgtgattttcttggagacgggttatttacaagctggacgcatgaaccgaattggaaaaaagcgcataatatcttaggcccaagctttagtcagcgtgcaatgaaacgttatcatgcgatgatggtcgatatcgccgtgcagcttgttcaaaagtgggagcgtctaaatgcagatgagcatattgaagtatcggaagacatgacacgtttaacgcttgatacaattggtctttgcggctttaactatcgctttaacagcttttaccgagatcagcctcatccatttattgtgagtatggtccgtgcactggatgaagtaatgaacaagctgcagcgagcaaatccagacgacccagcttatgatgaaaacaagcgccagtgtcaagaagatatcaaggtgatgaacgactatgtagataaaattattgcagatcgcaaagcaaggggtgaacaaagccatgatttattaacgcagatgctaaacggaaaagatccagaaacgggtgagccgcttgatgacgggaacattcgttatcaaattattacattcttaattgcgggacacgaaacaacaagtggtcttttatcatttgcgctgtatttcttagtgaaaaatccacatgtattacaaaaagtagcagaagaagcagcacgagttctagtagatcctgttccaagctacaaacaagtcaaacagcttaaatatgtcggcatggtcttaaacgaagcgctgcgcttatggccaactgctcctgcgttttccctatatgcaaaagaagatacggtgcttggaggagaatatcctttaaccaaaggcgacgaagtaatggttctgattcctcagcttcaccgtgataaaacaatttggggagacgatgtggaggagttccgtccagagcgttttgaaaatccaagtgcgattccgcagcatgcgtttaaaccgtttggaaacggtcagcgtgcgtgtatcggtcagcagttcgctcttcatgaagcaacgctggtacttggtatgatgctaaaacactttgactttgaagatcatacaaactacgagctcgttattaaagaaactttaacgttaaaacctgaaggctttgtggtaaaagcaaaatcgaaaggcattccgcttggcggtattccttcacctagcactgaacagtctgctaaaaaagtacgcaaaaaggcagaaaacgctcataatacgccgctgcttgtgctatacggttcaaatgcgggaacagctgaaggaacggcgcgtgatttagcagatattgcaatgagcaaaggatttgcaccgcaggtcgcaacgcttgattcacacgccggaaatcttccgcgcgaaggagctgtattaattgtaacggcgtcttataacggtcatccgcctgataacgcaaagcaatttgtcgactggttagaccaagcgtctgctgatgaagtaaaaggcgttcgctactccgtatttggatgcggcgataaaaactgggctgcgacgtatcaaaaagtgcctgcttttatcgatgaaacgcttgccgctaaaggggcagaaaacatcgctgaccgcggtgaagcagatgcaagcgacgactttgaaggcacatatgaagaatggcgtgatcatatgtggagtgacgtagcagcctactttaacctcgacattgaaaacagtgaagataataaatctactctttcacttcaatttgtcgacagcgccgcggatatgccgcttgcgaaaatgcacggtgcgttttcaacgaacgtcgtagcaagcaaagaacttcaacagccaggcagtgcacgaagcacgcgacatcttgaaattgaacttccaaaagaagcttcttatcaagaaggagatcatttaggtgttattcctcgcaactatgaaggaatagtaaaccgtgtaacagcaaggttcggcctaagcgcatcacagcaaatccgtctggaagcagaagaagaaaaattagctcatttgccactcgctaaaacagtatccgtagaagagcttctgcaatacgtggagcttcaagatcctgttacgcgcacgcagcttcgcgcaatggctgctaaaacggtctgcccgccgcataaagtagagcttgaagccttgcttgaaaagcaagcctacaaagaacaagtgctggcaaaacgtttaacaatgcttgaactgcttgaaaaatacccggcgtgtgaaatgaaattcagcgaatttatcgcccttctgccaagcatacgcccgcgctattactcgatttcttcatcacctcgtgtcgatgaaaaacaagcaagcatcacggtcagcgttgtctcaggaccggcgtggagcggatatggagaatataaaggaattgcgtcgaactatcttgccgagctgcaagaaggagatacgattacgtgctttatttccacaccgcagtcagaatttacgctgccaaaagaccctgaaacgccgcttatcatggtcggaccgggaacaggcgtcgcgccgtttagaggctttgtgcaggcgcgcaaacagctaaaagaacaaggacagtcacttggagaagcacatttatacttcggctgccgttcacctcatgaagactatctgtatcaagaagagcttgaaaacgcccaaagcgaaggcatcattacgcttcataccgctttttctcgcatgccaaatcagccgaaaacatacgttcagcacgtaatggaacaagacggcaagaaattgattgaacttcttgatcaaggagcgcacttctatatttgcggagacggaagccaaatggcacctgccgttgaagcaacgcttatgaaaagctatgctgacgttcaccaagtgagtgaagcagacgctcgcttatggctgcagcagctagaagaaaaaggccgatacgcaaaagacgtgtgggctggg

SEQ ID NO: 42 - protein, 1049 aa, synthetic construct
  REGION 1..1049: note = Variant of cytochrome P450
MTIKEMPQPKTFGELKNLPLLNTDKPVQALMRIADELGEIFKFEAPGSVTRFLSSQRLIKEACDESRFDKNLSQALKFARDFLGDGLFTSWTHEPNWKKAHNILGPSFSQRAMKRYHAMMVDIAVQLVQKWERLNADEHIEVSEDMTRLTLDTIGLCGFNYRFNSFYRDQPHPFIVSMVRALDEVMNKLQRANPDDPAYDENKRQCQEDIKVMNDYVDKIIADRKARGEQSHDLLTQMLNGKDPETGEPLDDGNIRYQIITFLIAGHETTSGLLSFALYFLVKNPHVLQKVAEEAARVLVDPVPSYKQVKQLKYVGMVLNEALRLWPTAPAFSLYAKEDTVLGGEYPLTKGDEVMVLIPQLHRDKTIWGDDVEEFRPERFENPSAIPQHAFKPFGNGQRACIGQQFALHEATLVLGMMLKHFDFEDHTNYELVIKETLTLKPEGFVVKAKSKGIPLGGIPSPSTEQSAKKVRKKAENAHNTPLLVLYGSNAGTAEGTARDLADIAMSKGFAPQVATLDSHAGNLPREGAVLIVTASYNGHPPDNAKQFVDWLDQASADEVKGVRYSVFGCGDKNWAATYQKVPAFIDETLAAKGAENIADRGEADASDDFEGTYEEWRDHMWSDVAAYFNLDIENSEDNKSTLSLQFVDSAADMPLAKMHGAFSTNVVASKELQQPGSARSTRHLEIELPKEASYQEGDHLGVIPRNYEGIVNRVTARFGLSASQQIRLEAEEEKLAHLPLAKTVSVEELLQYVELQDPVTRTQLRAMAAKTVCPPHKVELEALLEKQAYKEQVLAKRLTMLELLEKYPACEMKFSEFIALLPSIRPRYYSISSSPRVDEKQASITVSVVSGPAWSGYGEYKGIASNYLAELQEGDTITCFISTPQSEFTLPKDPETPLIMVGPGTGVAPFRGFVQARKQLKEQGQSLGEAHLYFGCRSPHEDYLYQEELENAQSEGIITLHTAFSRMPNQPKTYVQHVMEQDGKKLIELLDQGAHFYICGDGSQMAPAVEATLMKSYADVHQVSEADARLWLQQLEEKGRYAKDVWAG

SEQ ID NO: 43 - DNA, 3147 bp, synthetic construct
  misc_feature 1..3147: note = Variant of cytochrome P450
  source 1..3147: mol_type = other DNA
atgacaataaaggaaatgccgcagccgaaaacgtttggagaacttaaaaatttaccgttattaaacacagataaaccggttcaagctttgatgcgtattgcggatgaattaggagaaatctttaaattcgaggcgcctggtagcgtaacgcgctttttatcaagtcagcgtctaattaaagaagcatgcgatgaatcacgctttgataaaaacttaagtcaagcgcttaaatttgcacgtgattttcttggagacgggttatttacaagctggacgcatgaaccgaattggaaaaaagcgcataatatcttactgccaagctttagtcagcgtgcaatgaaacgttatcatgcgatgatggtcgatatcgccgtgcagcttgttcaaaagtgggagcgtctaaatgcagatgagcatattgaagtatcggaagacatgacacgtttaacgcttgatacaattggtctttgcggctttaactatcgctttaacagcttttaccgagatcagcctcatccatttattgtgagtatggtccgtgcactggatgaagtaatgaacaagctgcagcgagcaaatccagacgacccagcttatgatgaaaacaagcgccagtgtcaagaagatatcaaggtgatgaacgactatgtagataaaattattgcagatcgcaaagcaaggggtgaacaaagccatgatttattaacgcagatgctaaacggaaaagatccagaaacgggtgagccgcttgatgacgggaacattagctatcaaattattacattcttaattgcgggacacgaaacaacaagtggtcttttatcatttgcgctgtatttcttagtgaaaaatccacatgtattacaaaaagtagcagaagaagcagcacgagttctagtagatcctgttccaagctacaaacaagtcaaacagcttaaatatgtcggcatggtcttaaacgaagcgctgcgcttatggccaactgctcctgcgttttccctatatgcaaaagaagatacggtgcttggaggagaatatcctttaaccaaaggcgacgaagtaatggttctgattcctcagcttcaccgtgataaaacaatttggggagacgatgtggaggagttccgtccagagcgttttgaaaatccaagtgcgattccgcagcatgcgtttaaaccgtttggaaacggtcagcgtgcgtgtatcggtcagcagttcgctcttcatgaagcaacgctggtacttggtatgatgctaaaacactttgactttgaagatcatacaaactacgagctcgatattaaagaaactttaacgttaaaacctgaaggctttgtggtaaaagcaaaatcgaaaaaaattccgcttggcggtattccttcacctagcactgaacagtctgctaaaaaagtacgcaaaaaggcagaaaacgctcataatacgccgctgcttgtgctatacggttcaaatgcgggaacagctgaaggaacggcgcgtgatttagcagatattgcaatgagcaaaggatttgcaccgcaggtcgcaacgcttgattcacacgccggaaatcttccgcgcgaaggagctgtattaattgtaacggcgtcttataacggtcatccgcctgataacgcaaagcaatttgtcgactggttagaccaagcgtctgctgatgaagtaaaaggcgttcgctactccgtatttggatgcggcgataaaaactgggctgcgacgtatcaaaaagtgcctcgctttatcgatgaaacgcttgccgctaaaggggcagaaaacatcgctgaccgcggtgaagcagatgcaagcgacgactttgaaggcacatatgaagaatggcgtgatcatatgtggagtgacgtagcagcctactttaacctcgacattgaaaacagtgaagataataaatctactctttcacttcaatttgtcgacagcgccgcggatatgccgcttgcgaaaatgcacggtgcgttctcaacgaacgtcgtagcaagcaaagaacttcaacagccaggcagtgcacgaagcacgcgacatcttgaaattgaacttccaaaagaagcttcttatcaagaaggagatcatttaggtgttattcctcgcaactatgaaggaatagtaaaccgtgtaacagcaaggttcggcctaagcgcatcacagcaaatccgtctggaagcagaagaagaaaaattagctcatttgccactcgctaaaacagtatccgtagaggagcttctgcaatacgtggagcttcaagatcctgttacgcgcacgcagcttcgcgcaatggctgctaaaacggtctgcccgccgcataaagtagagcttgaagccttgcttgaaaagcaagcctacaaagaacaagtgctggcaaaacgtttaacaatgcttgaactgcttgaaaaatacccggcgtgtgaaatgaaattcagcgaatttatcgcccttctgccaagcatacgcccgcgctattactcgatttcttcatcacctcgtgtcgatgaaaaacaagcaagcatcacggtcagcgttgtctcaggagaagcgtggagcggatatggagaatataaaggaattgcgtcgaactatcttgccgagctgcaagaaggagatacgattacgtgctttatttccacaccgcagtcagaatttacgctgccaaaagaccctgaaacgccgcttatcatggtcggaccgggaacaggcgtcgcgccgtttagaggctttgtgcaggcgcgcaaacagctaaaagaacaaggacagtcacttggagaagcacatttatacttcggctgccgttcacctcatgaagactatctgtatcaagaagagcttgaaaacgcccaaagcgaaggcatcattacgcttcataccgctttttctcgcatgccaaatcagccgaaaacatacgttcagcacgtaatggaacaagacggcaagaaattgattgaacttcttgatcaaggagcgcacttctatatttgcggagacggaagccaaatggcacctgccgttgaagcaacgcttatgaaaagctatgctgacgttcaccaagtgagtgaagcagacgctcgcttatggctgcagcagctagaagaaaaaggccgatacgcaaaagacgtgtgggctggg

SEQ ID NO: 44 - protein, 1049 aa, synthetic construct
  REGION 1..1049: note = Variant of cytochrome P450
MTIKEMPQPKTFGELKNLPLLNTDKPVQALMRIADELGEIFKFEAPGSVTRFLSSQRLIKEACDESRFDKNLSQALKFARDFLGDGLFTSWTHEPNWKKAHNILLPSFSQRAMKRYHAMMVDIAVQLVQKWERLNADEHIEVSEDMTRLTLDTIGLCGFNYRFNSFYRDQPHPFIVSMVRALDEVMNKLQRANPDDPAYDENKRQCQEDIKVMNDYVDKIIADRKARGEQSHDLLTQMLNGKDPETGEPLDDGNISYQIITFLIAGHETTSGLLSFALYFLVKNPHVLQKVAEEAARVLVDPVPSYKQVKQLKYVGMVLNEALRLWPTAPAFSLYAKEDTVLGGEYPLTKGDEVMVLIPQLHRDKTIWGDDVEEFRPERFENPSAIPQHAFKPFGNGQRACIGQQFALHEATLVLGMMLKHFDFEDHTNYELDIKETLTLKPEGFVVKAKSKKIPLGGIPSPSTEQSAKKVRKKAENAHNTPLLVLYGSNAGTAEGTARDLADIAMSKGFAPQVATLDSHAGNLPREGAVLIVTASYNGHPPDNAKQFVDWLDQASADEVKGVRYSVFGCGDKNWAATYQKVPRFIDETLAAKGAENIADRGEADASDDFEGTYEEWRDHMWSDVAAYFNLDIENSEDNKSTLSLQFVDSAADMPLAKMHGAFSTNVVASKELQQPGSARSTRHLEIELPKEASYQEGDHLGVIPRNYEGIVNRVTARFGLSASQQIRLEAEEEKLAHLPLAKTVSVEELLQYVELQDPVTRTQLRAMAAKTVCPPHKVELEALLEKQAYKEQVLAKRLTMLELLEKYPACEMKFSEFIALLPSIRPRYYSISSSPRVDEKQASITVSVVSGEAWSGYGEYKGIASNYLAELQEGDTITCFISTPQSEFTLPKDPETPLIMVGPGTGVAPFRGFVQARKQLKEQGQSLGEAHLYFGCRSPHEDYLYQEELENAQSEGIITLHTAFSRMPNQPKTYVQHVMEQDGKKLIELLDQGAHFYICGDGSQMAPAVEATLMKSYADVHQVSEADARLWLQQLEEKGRYAKDVWAG

SEQ ID NO: 45 - DNA, 3147 bp, synthetic construct
  misc_feature 1..3147: note = Variant of cytochrome P450
  source 1..3147: mol_type = other DNA
atgacaataaaggaaatgccgcagccgaaaacgtttggagaacttaaaaatttaccgttattaaacacagataaaccggttcaagctttgatgcgtattgcggatgaattaggagaaatctttaaattcgaggcgcctggtagcgtaacgcgctttttatcaagtcagcgtctaattaaagaagcatgcgatgaatcacgctttgataaaaacttaagtcaagcgcttaaatttgcacgtgattttcttggagacgggttatttacaagctggacgcatgaaccgaattggaaaaaagcgcataatatcttactgccaagctttagtcagcgtgcaatgaaacgttatcatgcgatgatggtcgatatcgccgtgcagcttgttcaaaagtgggagcgtctaaatgcagatgagcatattgaagtatcggaagacatgacacgtttaacgcttgatacaattggtctttgcggctttaactatcgctttaacagcttttaccgagatcagcctcatccatttattgtgagtatggtccgtgcactggatgaagtaatgaacaagctgcagcgagcaaatccagacgacccagcttatgatgaaaacaagcgccagtgtcaagaagatatcaaggtgatgaacgactatgtagataaaattattgcagatcgcaaagcaaggggtgaacaaagccatgatttattaacgcagatgctaaacggaaaagatccagaaacgggtgagccgcttgatgacgggaacattcgttatcaaattattacattcttaattgcgggacacgaaacaacaagtggtcttttatcatttgcgctgtatttcttagtgaaaaatccacatgtattacaaaaagtagcagaagaagcagcacgagttctagtagatcctgttccaagctacaaacaagtcaaacagcttaaatatgtcggcatggtcttaaacgaagcgctgcgcttatggccaactgctcctgcgttttccctatatgcaaaagaagatacggtgcttggaggagaatatcctttaaccaaaggcgacgaagtaatggttctgattcctcagcttcaccgtgataaaacaatttggggagacgatgtggaggagttccgtccagagcgttttgaaaatccaagtgcgattccgcagcatgcgtttaaaccgtttggaaacggtcagcgtgcgtgtatcggtcagcagttcgctcttcatgaagcaacgctggtacttggtatgatgctaaaacactttgactttgaagatcatacaaactacgagctcgttattaaagaaactttaacgttaaaacctgaaggctttgtggtaaaagcaaaatcgaaaggcattccgcttggcggtattccttcacctagcactgaacagtctgctaaaaaagtacgcaaaaaggcagaaaacgctcataatacgccgctgcttgtgctatacggttcaaatgcgggaacagctgaaggaacggcgcgtgatttagcagatattgcaatgagcaaaggatttgcaccgcaggtcgcaacgcttgattcacacgccggaaatcttccgcgcgaaggagctgtattaattgtaacggcgtcttataacggtcatccgcctgataacgcaaagcaatttgtccgctggttagaccaagcgtctgctgatgaagtaaaaggcgttcgctactccgtatttggatgcggcgataaaaactgggctgcgacgtatcaaaaagtgcctgcttttatcgatgaaacgcttgccgctaaaggggcagaaaacatcgctgaccgcggtgaagcagatgcaagcgacgactttgaaggcacatatgaagaatggcgtgatcatatgtggagtgacgtagcagcctactttaacctcgacattgaaaacagtgaagataataaatctactctttcacttcaatttgtcgacagcgccgcggatatgccgcttgcgaaaatgcacggtgcgctgtcaacgaacgtcgtagcaagcaaagaacttcaacagccaggcagtgcacgaagcacgcgacatatcgaaattgaacttccaaaagaagcttcttatcaagaaggagatcatttaggtgttattcctcgcaactatgaaggaatagtaaaccgtgtaacagcaaggttcggcctaagcgcatcacagcaaatccgtctggaagcagaagaagaaaaattagctcatttgccactcgctaaaacagtatccgtagaagagcttctgcaatacgtggagcttcaagatcctgttacgcgcacgcagcttcgcgcaatggctgctaaaacggtctgcccgccgcataaagtagagcttgaagccttgcttgaaaagcaagcctacaaagaacaagtgctggcaaaacgtttaacaatgcttgaactgcttgaaaaatacccggcgtgtgaaatgaaattcagcgaatttatcgcccttctgccaagcatacgcccgcgctattactcgatttcttcatcacctcgtgtcgatgaaaaacaagcaagcatcacggtcagcgttgtctcaggagaagcgtggagcggatatggagaatataaaggaattgcgtcgaactatcttgccgagctgcaagaaggagatacgattacgtgctttatttccacaccgcagtcagaatttacgctgccaaaagaccctgaaacgccgcttatcatggtcggaccgggaacaggcgtcgcgccgtttagaggctttgtgcaggcgcgcaaacagctaaaagaacaaggacagtcacttggagaagcacatttatacttcggctgccgttcacctcatgaagactatctgtatcaagaagagcttgaaaacgcccaaagcgaaggcatcattacgcttcataccgctttttctcgcatgccaaatcagccgaaaacatacgttcagcacgtaatggaacaagacggcaagaaattgattgaacttcttgatcaaggagcgcacttctatatttgcggagacggaagccaaatggcacctgccgttgaagcaacgcttatgaaaagctatgctgacgttcaccaagtgagtgaagcagacgctcgcttatggctgcagcagctagaagaaaaaggccgatacgcaaaagacgtgtgggctggg

SEQ ID NO: 46 - protein, 1049 aa, synthetic construct
  REGION 1..1049: note = Variant of cytochrome P450
MTIKEMPQPKTFGELKNLPLLNTDKPVQALMRIADELGEIFKFEAPGSVTRFLSSQRLIKEACDESRFDKNLSQALKFARDFLGDGLFTSWTHEPNWKKAHNILLPSFSQRAMKRYHAMMVDIAVQLVQKWERLNADEHIEVSEDMTRLTLDTIGLCGFNYRFNSFYRDQPHPFIVSMVRALDEVMNKLQRANPDDPAYDENKRQCQEDIKVMNDYVDKIIADRKARGEQSHDLLTQMLNGKDPETGEPLDDGNIRYQIITFLIAGHETTSGLLSFALYFLVKNPHVLQKVAEEAARVLVDPVPSYKQVKQLKYVGMVLNEALRLWPTAPAFSLYAKEDTVLGGEYPLTKGDEVMVLIPQLHRDKTIWGDDVEEFRPERFENPSAIPQHAFKPFGNGQRACIGQQFALHEATLVLGMMLKHFDFEDHTNYELVIKETLTLKPEGFVVKAKSKGIPLGGIPSPSTEQSAKKVRKKAENAHNTPLLVLYGSNAGTAEGTARDLADIAMSKGFAPQVATLDSHAGNLPREGAVLIVTASYNGHPPDNAKQFVRWLDQASADEVKGVRYSVFGCGDKNWAATYQKVPAFIDETLAAKGAENIADRGEADASDDFEGTYEEWRDHMWSDVAAYFNLDIENSEDNKSTLSLQFVDSAADMPLAKMHGALSTNVVASKELQQPGSARSTRHIEIELPKEASYQEGDHLGVIPRNYEGIVNRVTARFGLSASQQIRLEAEEEKLAHLPLAKTVSVEELLQYVELQDPVTRTQLRAMAAKTVCPPHKVELEALLEKQAYKEQVLAKRLTMLELLEKYPACEMKFSEFIALLPSIRPRYYSISSSPRVDEKQASITVSVVSGEAWSGYGEYKGIASNYLAELQEGDTITCFISTPQSEFTLPKDPETPLIMVGPGTGVAPFRGFVQARKQLKEQGQSLGEAHLYFGCRSPHEDYLYQEELENAQSEGIITLHTAFSRMPNQPKTYVQHVMEQDGKKLIELLDQGAHFYICGDGSQMAPAVEATLMKSYADVHQVSEADARLWLQQLEEKGRYAKDVWAG

SEQ ID NO: 47 - DNA, 3147 bp, synthetic construct
  misc_feature 1..3147: note = Variant of cytochrome P450
  source 1..3147: mol_type = other DNA
atgacaataaaggaaatgccgcagccgaaaacgtttggagaacttaaaaatttaccgttattaaacacagataaaccggttcaagctttgatgcgtattgcggatgaattaggagaaatctttaaattcgaggcgcctggtagcgtaacgcgctttttatcaagtcagcgtctaattaaagaagcatgcgatgaatcacgctttgataaaaacttaagtcaagcgcttaaatttgcacgtgattttcttggagacgggttatttacaagctggacgcatgaaccgaattggaaaaaagcgcataatatcttacttccaagctttagtcagcgtgcaatgaaacgttatcatgcgatgatggtcgatatcgccgtgcagcttgttcaaaagtgggagcgtctaaatgcagatgagcatattgaagtatcggaagacatgacacgtttaacgcttgatacaattggtctttgcggctttaactatcgctttaacagcttttaccgagatcagcctcatccatttattgtgagtatggtccgtgcactggatgaagtaatgaacaagctgcagcgagcaaatccagacgacccagcttatgatgaaaacaagcgccagtgtcaagaagatatcaaggtgatgaacgactatgtagataaaattattgcagatcgcaaagcaaggggtgaacaaagccatgatttattaacgcagatgctaaacggaaaagatccagaaacgggtgagccgcttgatgacgggttgattagctatcaaattattacattcttaattgcgggacacgaaacaacaagtggtcttttatcatttgcgctgtatttcttagtgaaaaatccacatgtattacaaaaagtagcagaagaagcagcacgagttctagtagatcctgttccaagctacaaacaagtcaaacagcttaaatatgtcggcatggtcttaaacgaagcgctgcgcttatggccaactgctcctgcgttttccctatatgcaaaagaagatacggtgcttggaggagaatatcctttaaccaaaggcgacgaagtaatggttctgattcctcagcttcaccgtgataaaacaatttggggagacgatgtggaggagttccgtccagagcgttttgaaaatccaagtgcgattccgcagcatgcgtttaaaccgtttggaaacggtcagcgtgcgtgtatcggtcagcagttcgctcttcatgaagcaacgctggtacttggtatgatgctaaaacactttgactttgaagatcatacaaactacgagctcgatattaaagaaactttaacgttaaaacctgaaggctttgtggtaaaagcaaaatcgaaaaaaattccgcttggcggtattccttcacctagcactgaacagtctgctaaaaaagtacgcaaaaaggcagaaaacgctcataatacgccgctgcttgtgctatacggttcaaatgcgggaacagctgaaggaacggcgcgtgatttagcagatattgcaatgagcaaaggatttgcaccgcaggtcgcaacgcttgattcacacgccggaaatcttccgcgcgaaggagctgtattaattgtaacggcgtcttataacggtcatccgcctgataacgcaaagcaatttgtcgactggttagaccaagcgtctgctgatgaagtaaaaggcgttcgctactccgtatttggatgcggcgataaaaactgggctgcgacgtatcaaaaagtgcctgcttttatcgatgaaacgcttgccgctaaaggggcagaaaacatcgctgaccgcggtgaagcagatgcaagcgacgactttgaaggcacatatgaagaatggcgtgatcatatgtggagtgacgtagcagcctactttaacctcgacattgaaaacagtgaagataataaatctactctttcacttcaatttgtcgacagcgccgcggatatgccgcttgcgaaaatgcacggtgcgttttcaacgaacgtcgtagcaagcaaagaacttcaacagccaggcagtgcacgaagcacgcgacatcttgaaattgaacttccaaaagaagcttcttatcaagaaggagatcatttaggtgttattcctcgcaactatgaaggaatagtaaaccgtgtaacagcaaggttcggcctaagcgcatcacagcaaatccgtctggaagcagaagaagaaaaattagctcatttgccactcgctaaaacagtatccgtagaagagcttctgcaatacgtggagcttcaagatcctgttacgcgcacgcagcttcgcgcaatggctgctaaaacggtctgcccgccgcataaagtagagcttgaagccttgcttgaaaagcaagcctacaaagaacaagtgctggcaaaacgtttaacaatgcttgaactgcttgaaaaatacccggcgtgtgaaatgaaattcagcgaatttatcgcccttctgccaagcatacgcccgcgctattactcgatttcttcatcacctcgtgtcgatgaaaaacaagcaagcatcacggtcagcgttgtctcaggagaagcgtggagcggatatggagaatataaaggaattgcgtcgaactatcttgccgagctgcaagaaggagatacgattacgtgctttatttccacaccgcagtcagaatttacgctgccaaaagaccctgaaacgccgcttatcatggtcggaccgggaacaggcgtcgcgccgtttagaggctttgtgcaggcgcgcaaacagctaaaagaacaaggacagtcacttggagaagcacatttatacttcggctgccgttcacctcatgaagactatctgtatcaagaagagcttgaaaacgcccaaagcgaaggcatcattacgcttcataccgctttttctcgcatgccaaatcagccgaaaacatacgttcagcacgtaatggaacaagacggcaagaaattgattgaacttcttgatcaaggagcgcacttctatatttgcggagacggaagccaaatggcacctgccgttgaagcaacgcttatgaaaagctatgctgacgttcaccaagtgagtgaagcagacgctcgcttatggctgcagcagctagaagaaaaaggccgatacgcaaaagacgtgtgggctggg

SEQ ID NO: 48 - protein, 1049 aa, synthetic construct
  REGION 1..1049: note = Variant of cytochrome P450
MTIKEMPQPKTFGELKNLPLLNTDKPVQALMRIADELGEIFKFEAPGSVTRFLSSQRLIKEACDESRFDKNLSQALKFARDFLGDGLFTSWTHEPNWKKAHNILLPSFSQRAMKRYHAMMVDIAVQLVQKWERLNADEHIEVSEDMTRLTLDTIGLCGFNYRFNSFYRDQPHPFIVSMVRALDEVMNKLQRANPDDPAYDENKRQCQEDIKVMNDYVDKIIADRKARGEQSHDLLTQMLNGKDPETGEPLDDGLISYQIITFLIAGHETTSGLLSFALYFLVKNPHVLQKVAEEAARVLVDPVPSYKQVKQLKYVGMVLNEALRLWPTAPAFSLYAKEDTVLGGEYPLTKGDEVMVLIPQLHRDKTIWGDDVEEFRPERFENPSAIPQHAFKPFGNGQRACIGQQFALHEATLVLGMMLKHFDFEDHTNYELDIKETLTLKPEGFVVKAKSKKIPLGGIPSPSTEQSAKKVRKKAENAHNTPLLVLYGSNAGTAEGTARDLADIAMSKGFAPQVATLDSHAGNLPREGAVLIVTASYNGHPPDNAKQFVDWLDQASADEVKGVRYSVFGCGDKNWAATYQKVPAFIDETLAAKGAENIADRGEADASDDFEGTYEEWRDHMWSDVAAYFNLDIENSEDNKSTLSLQFVDSAADMPLAKMHGAFSTNVVASKELQQPGSARSTRHLEIELPKEASYQEGDHLGVIPRNYEGIVNRVTARFGLSASQQIRLEAEEEKLAHLPLAKTVSVEELLQYVELQDPVTRTQLRAMAAKTVCPPHKVELEALLEKQAYKEQVLAKRLTMLELLEKYPACEMKFSEFIALLPSIRPRYYSISSSPRVDEKQASITVSVVSGEAWSGYGEYKGIASNYLAELQEGDTITCFISTPQSEFTLPKDPETPLIMVGPGTGVAPFRGFVQARKQLKEQGQSLGEAHLYFGCRSPHEDYLYQEELENAQSEGIITLHTAFSRMPNQPKTYVQHVMEQDGKKLIELLDQGAHFYICGDGSQMAPAVEATLMKSYADVHQVSEADARLWLQQLEEKGRYAKDVWAG

SEQ ID NO: 49 - DNA, 3147 bp, synthetic construct
  misc_feature 1..3147: note = Variant of cytochrome P450
  source 1..3147: mol_type = other DNA
atgacaataaaggaaatgccgcagccgaaaacgtttggagaacttaaaaatttaccgttattaaacacagataaaccggttcaagctttgatgcgtattgcggatgaattaggagaaatctttaaattcgaggcgcctggtagcgtaacgcgctttttatcaagtcagcgtctaattaaagaagcatgcgatgaatcacgctttgataaaaacttaagtcaagcgcttaaatttgcacgtgattttcttggagacgggttatttacaagctggacgcatgaaccgaattggaaaaaagcgcataatatcttacttccaagctttagtcagcgtgcaatgaaacgttatcatgcgatgatggtcgatatcgccgtgcagcttgttcaaaagtgggagcgtctaaatgcagatgagcatattgaagtatcggaagacatgacacgtttaacgcttgatacaattggtctttgcggctttaactatcgctttaacagcttttaccgagatcagcctcatccatttattgtgagtatggtccgtgcactggatgaagtaatgaacaagctgcagcgagcaaatccagacgacccagcttatgatgaaaacaagcgccagtgtcaagaagatatcaaggtgatgaacgactatgtagataaaattattgcagatcgcaaagcaaggggtgaacaaagccatgatttattaacgcagatgctaaacggaaaagatccagaaacgggtgagccgcttgatgacgggaacattagctatcaaattattacattcttaattgcgggacacgaaacaacaagtggtcttttatcatttgcgctgtatttcttagtgaaaaatccacatgtattacaaaaagtagcagaagaagcagcacgagttctagtagatcctgttccaagctacaaacaagtcaaacagcttaaatatgtcggcatggtcttaaacgaagcgctgcgcttatggccaactgctcctgcgttttccctatatgcaaaagaagatacggtgcttggaggagaatatcctttaaccaaaggcgacgaagtaatggttctgattcctcagcttcaccgtgataaaacaatttggggagacgatgtggaggagttccgtccagagcgttttgaaaatccaagtgcgattccgcagcatgcgtttaaaccgtttggaaacggtcagcgtgcgtgtatcggtcagcagttcgctcttcatgaagcaacgctggtacttggtatgatgctaaaacactttgactttgaagatcatacaaactacgagctcgatattaaagaagggttaacgttaaaacctgaaggctttgtggtaaaagcaaaatcgaaaaaaattccgcttggcggtattccttcacctagcactgaacagtctgctaaaaaagtacgcaaaaaggcagaaaacgctcataatacgccgctgcttgtgctatacggttcaaatgcgggaacagctgaaggaacggcgcgtgatttagcagatattgcaatgagcaaaggatttgcaccgcaggtcgcaacgcttgattcacacgccggaaatcttccgcgcgaaggagctgtattaattgtaacggcgtcttataacggtcatccgcctgataacgcaaagcaatttgtcgactggttagaccaagcgtctgctgatgaagtaaaaggcgttcgctactccgtatttggatgcggcgataaaaactgggctgcgacgtatcaaaaagtgcctgcttttatcgatgaaacgcttgccgctaaaggggcagaaaacatcgctgaccgcggtgaagcagatgcaagcgacgactttgaaggcacatatgaagaatggcgtgatcatatgtggagtgacgtagcagcctactttaacctcgacattgaaaacagtgaagataataaatctactctttcacttcaatttgtcgacagcgccgcggatatgccgcttgcgaaaatgcacggtgcgttttcaacgaacgtcgtagcaagcaaagaacttcaacagccaggcagtgcacgaagcacgcgacatcttgaaattgaacttccaaaagaagcttcttatcaagaaggagatcatttaggtgttattcctcgcaactatgaaggaatagtaaaccgtgtaacagcaaggttcggcctaagcgcatcacagcaaatccgtctggaagcagaagaagaaaaattagctcatttgccactcgctaaaacagtatccgtagaagagcttctgcaatacgtggagcttcaagatcctgttacgcgcacgcagcttcgcgcaatggctgctaaaacggtctgcccgccgcataaagtagagcttgaagccttgcttgaaaagcaagcctacaaagaacaagtgctggcaaaacgtttaacaatgcttgaactgcttgaaaaatacccggcgtgtgaaatgaaattcagcgaatttatcgcccttctgccaagcatacgcccgcgctattactcgatttcttcatcacctcgtgtcgatgaaaaacaagcaagcatcacggtcagcgttgtctcaggagaagcgtggagcggatatggagaatataaaggaattgcgtcgaactatcttgccgagctgcaagaaggagatacgattacgtgctttatttccacaccgcagtcagaatttacgctgccaaaagaccctgaaacgccgcttatcatggtcggaccgggaacaggcgtcgcgccgtttagaggctttgtgcaggcgcgcaaacagctaaaagaacaaggacagtcacttggagaagcacatttatacttcggctgccgttcacctcatgaagactatctgtatcaagaagagcttgaaaacgcccaaagcgaaggcatcattacgcttcataccgctttttctcgcatgccaaatcagccgaaaacatacgttcagcacgtaatggaacaagacggcaagaaattgattgaacttcttgatcaaggagcgcacttctatatttgcggagacggaagccaaatggcacctgccgttgaagcaacgcttatgaaaagctatgctgacgttcaccaagtgagtgaagcagacgctcgcttatggctgcagcagctagaagaaaaaggccgatacgcaaaagacgtgtgggctggg

SEQ ID NO: 50 - protein, 1049 aa, synthetic construct
  REGION 1..1049: note = Variant of cytochrome P450
MTIKEMPQPKTFGELKNLPLLNTDKPVQALMRIADELGEIFKFEAPGSVTRFLSSQRLIKEACDESRFDKNLSQALKFARDFLGDGLFTSWTHEPNWKKAHNILLPSFSQRAMKRYHAMMVDIAVQLVQKWERLNADEHIEVSEDMTRLTLDTIGLCGFNYRFNSFYRDQPHPFIVSMVRALDEVMNKLQRANPDDPAYDENKRQCQEDIKVMNDYVDKIIADRKARGEQSHDLLTQMLNGKDPETGEPLDDGNISYQIITFLIAGHETTSGLLSFALYFLVKNPHVLQKVAEEAARVLVDPVPSYKQVKQLKYVGMVLNEALRLWPTAPAFSLYAKEDTVLGGEYPLTKGDEVMVLIPQLHRDKTIWGDDVEEFRPERFENPSAIPQHAFKPFGNGQRACIGQQFALHEATLVLGMMLKHFDFEDHTNYELDIKEGLTLKPEGFVVKAKSKKIPLGGIPSPSTEQSAKKVRKKAENAHNTPLLVLYGSNAGTAEGTARDLADIAMSKGFAPQVATLDSHAGNLPREGAVLIVTASYNGHPPDNAKQFVDWLDQASADEVKGVRYSVFGCGDKNWAATYQKVPAFIDETLAAKGAENIADRGEADASDDFEGTYEEWRDHMWSDVAAYFNLDIENSEDNKSTLSLQFVDSAADMPLAKMHGAFSTNVVASKELQQPGSARSTRHLEIELPKEASYQEGDHLGVIPRNYEGIVNRVTARFGLSASQQIRLEAEEEKLAHLPLAKTVSVEELLQYVELQDPVTRTQLRAMAAKTVCPPHKVELEALLEKQAYKEQVLAKRLTMLELLEKYPACEMKFSEFIALLPSIRPRYYSISSSPRVDEKQASITVSVVSGEAWSGYGEYKGIASNYLAELQEGDTITCFISTPQSEFTLPKDPETPLIMVGPGTGVAPFRGFVQARKQLKEQGQSLGEAHLYFGCRSPHEDYLYQEELENAQSEGIITLHTAFSRMPNQPKTYVQHVMEQDGKKLIELLDQGAHFYICGDGSQMAPAVEATLMKSYADVHQVSEADARLWLQQLEEKGRYAKDVWAG

SEQ ID NO: 51 - DNA, 3147 bp, synthetic construct
  misc_feature 1..3147: note = Variant of cytochrome P450
  source 1..3147: mol_type = other DNA
atgacaataaaggaaatgccgcagccgaaaacgtttggagaacttaaaaatttaccgttattaaacacagataaaccggttcaagctttgatgcgtattgcggatgaattaggagaaatctttaaattcgaggcgcctggtagcgtaacgcgctttttatcaagtcagcgtctaattaaagaagcatgcgatgaatcacgctttgataaaaacttaagtcaagcgcttaaatttgcacgtgattttcttggagacgggttatttacaagctggacgcatgaaccgaattggaaaaaagcgcataatatcttacttccaagctttagtcagcgtgcaatgaaacgttatcatgcgatgatggtcgatatcgccgtgcagcttgttcaaaagtgggagcgtctaaatgcagatgagcatattgaagtatcggaagacatgacacgtttaacgcttgatacaattggtctttgcggctttaactatcgctttaacagcttttaccgagatcagcctcatccatttattgtgagtatggtccgtgcactggatgaagtaatgaacaagctgcagcgagcaaatccagacgacccagcttatgatgaaaacaagcgccagtgtcaagaagatatcaaggtgatgaacgactatgtagataaaattattgcagatcgcaaagcaaggggtgaacaaagccatgatttattaacgcagatgctaaacggaaaagatccagaaacgggtgagccgcttgatgacgggaacattagttatcaaattattacattcttaattgcgggacacgaaacaacaagtggtcttttatcatttgcgctgtatttcttagtgaaaaatccacatgtattacaaaaagtagcagaagaagcagcacgagttctagtagatcctgttccaagctacaaacaagtcaaacagcttaaatatgtcggcatggtcttaaacgaagcgctgcgcttatggccaactgctcctgcgttttccctatatgcaaaagaagatacggtgcttggaggagaatatcctttaaccaaaggcgacgaagtaatggttctgattcctcagcttcaccgtgataaaacaatttggggagacgatgtggaggagttccgtccagagcgttttgaaaatccaagtgcgattccgcagcatgcgtttaaaccgtttggaaacggtcagcgtgcgtgtatcggtcagcagttcgctcttcatgaagcaacgctggtacttggtatgatgctaaaacactttgactttgaagatcatacaaactacgagctcaagattaaagaaactttaacgttaaaacctgaaggctttgtggtaaaagcaaaatcgaaaaagattccgcttggcggtattccttcacctagcactgaacagtctgctaaaaaagtacgcaaaaaggcagaaaacgctcataatacgccgctgcttgtgctatacggttcaaatgcgggaacagctgaaggaacggcgcgtgatttagcagatattgcaatgagcaaaggatttgcaccgcaggtcgcaacgcttgattcacacgccggaaatcttccgcgcgaaggagctgtattaattgtaacggcgtcttataacggtcatccgcctgataacgcaaagcaatttgtcgactggttagaccaagcgtctgctgatgaagtaaacggcgttcgctactccgtatttggatgcggcgataaaacctgggctgcgacgtatcaaaaagtgcctgcttttatcgatgaaacgcttgccgctaaaggggcagaaaacatcgctcgccgcggtgaagcagatgcaagcgacgactttgaaggcacatatgaagaatggcgtgatcatatgtggagtgacgtagcagcctactttaacctcgacattgaaaacagtgaagataataaatctactctttcacttcaatttgtcgacagcgccgcggatatgccgcttgcgaaaatgcacggtgcgctgtcaacgaacgtcgtagcaagcaaagaacttcaacagccaggcagtgcacgaagcacgcgacatctggaaattgaacttccaaaagaagcttcttatcaagaaggagatcatttaggtgttattcctcgcaactatgaaggaatagtaaaccgtgtaacagcaaggttcggcctaagcgcatcacagcaaatccgtctggaagcagaagaagaaaaattagctcatttgccactcgctaaaacagtatccgtagaggagcttctgcaatacgtggagcttcaagatcctgttacgcgcacgcagcttcgcgcaatggctgctaaaacggtctgcccgccgcataaagtagagcttgaagccttgcttgaaaagcaagcctacaaagaacaagtgctggcaaaacgtttaacaatgcttgaactgcttgaaaaatacccggcgtgtgaaatgaaattcagcgaatttatcgcccttctgccaagcatccgcccgcgctattactcgatttcttcatcacctcgtgtcgatgaaaaacaagcaagcatcacggtcagcgttgtctcaggagaagcgtggagcggatatggagaatataaaggaattgcgtcgaactatcttgccgagctgcaagaaggagatacgattacgtgctttatttccacaccgcagtcagaatttacgctgccaaaagaccctgaaacgccgcttatcatggtcggaccgggaacaggcgtcgcgccgtttagaggctttgtgcaggcgcgcaaacagctaaaagaacaaggacagtcacttggagaagcacatttatacttcggctgccgttcacctcatgaagactatctgtatcaagaagagcttgaaaacgcccaaagcgaaggcatcattacgcttcataccgctttttctcgcatgccaaatcagccgaaaacatacgttcagcacgtaatggaacaagacggcaagaaattgattgaacttcttgatcaaggagcgcacttctatatttgcggagacggaagccaaatggcacctgccgttgaagcaacgcttatgaaaagctatgctgacgttcaccaagtgagtgaagcagacgctcgcttatggctgcagcagctagaagaaaaaggccgatacgcaaaagacgtgtgggctggg

SEQ ID NO: 52 - protein, 1049 aa, synthetic construct
  REGION 1..1049: note = Variant of cytochrome P450
MTIKEMPQPKTFGELKNLPLLNTDKPVQALMRIADELGEIFKFEAPGSVTRFLSSQRLIKEACDESRFDKNLSQALKFARDFLGDGLFTSWTHEPNWKKAHNILLPSFSQRAMKRYHAMMVDIAVQLVQKWERLNADEHIEVSEDMTRLTLDTIGLCGFNYRFNSFYRDQPHPFIVSMVRALDEVMNKLQRANPDDPAYDENKRQCQEDIKVMNDYVDKIIADRKARGEQSHDLLTQMLNGKDPETGEPLDDGNISYQIITFLIAGHETTSGLLSFALYFLVKNPHVLQKVAEEAARVLVDPVPSYKQVKQLKYVGMVLNEALRLWPTAPAFSLYAKEDTVLGGEYPLTKGDEVMVLIPQLHRDKTIWGDDVEEFRPERFENPSAIPQHAFKPFGNGQRACIGQQFALHEATLVLGMMLKHFDFEDHTNYELKIKETLTLKPEGFVVKAKSKKIPLGGIPSPSTEQSAKKVRKKAENAHNTPLLVLYGSNAGTAEGTARDLADIAMSKGFAPQVATLDSHAGNLPREGAVLIVTASYNGHPPDNAKQFVDWLDQASADEVNGVRYSVFGCGDKTWAATYQKVPAFIDETLAAKGAENIARRGEADASDDFEGTYEEWRDHMWSDVAAYFNLDIENSEDNKSTLSLQFVDSAADMPLAKMHGALSTNVVASKELQQPGSARSTRHLEIELPKEASYQEGDHLGVIPRNYEGIVNRVTARFGLSASQQIRLEAEEEKLAHLPLAKTVSVEELLQYVELQDPVTRTQLRAMAAKTVCPPHKVELEALLEKQAYKEQVLAKRLTMLELLEKYPACEMKFSEFIALLPSIRPRYYSISSSPRVDEKQASITVSVVSGEAWSGYGEYKGIASNYLAELQEGDTITCFISTPQSEFTLPKDPETPLIMVGPGTGVAPFRGFVQARKQLKEQGQSLGEAHLYFGCRSPHEDYLYQEELENAQSEGIITLHTAFSRMPNQPKTYVQHVMEQDGKKLIELLDQGAHFYICGDGSQMAPAVEATLMKSYADVHQVSEADARLWLQQLEEKGRYAKDVWAG

SEQ ID NO: 53 - DNA, 3147 bp, synthetic construct
  misc_feature 1..3147: note = Variant of cytochrome P450
  source 1..3147: mol_type = other DNA
atgacaataaaggaaatgccgcagccgaaaacgtttggagaacttaaaaatttaccgttattaaacacagataaaccggttcaagctttgatgcgtattgcggatgaattaggagaaatctttaaattcgaggcgcctggtagcgtaacgcgctttttatcaagtcagcgtctaattaaagaagcatgcgatgaatcacgctttgataaaaacttaagtcaagcgcttaaatttgcacgtgattttcttggagacagtttatttacaagctggacgcatgaaccgaattggaaaaaagcgcataatatcttacttccaagctttagtcagcgtgcaatgaaacgttatcatgcgatgatggtcgatatcgccgtgcagcttgttcaaaagtgggagcgtctaaatgcagatgagcatattgaagtatcggaagacatgacacgtttaacgcttgatacaattggtctttgcggctttaactatcgctttaacagcttttaccgagatcagcctcatccatttattgtgagtatggtccgtgcactggatgaagtaatgaacaagctgcagcgagcaaatccagacgacccagcttatgatgaaaacaagcgccagtgtcaagaagatatcaaggtgatgaacgactatgtagataaaattattgcagatcgcaaagcaaggggtgaacaaagccatgatttattaacgcagatgctaaacggaaaagatccagaaacgggtgagccgcttgatgacgggaacattagctatcaaattattacattcttaattgcgggacacgaaacaacaagtggtcttttatcatttgcgctgtatttcttagtgaaaaatccacatgtattacaaaaagtagcagaagaagcagcacgagttctagtagatcctgttccaagctacaaacaagtcaaacagcttaaatatgtcggcatggtcttaaacgaagcgctgcgcttatggccaactgctcctgcgttttccctatatgcaaaagaagatacggtgcttggaggagaatatcctttaaccaaaggcgacgaagtaatggttctgattcctcagcttcaccgtgataaaacaatttggggagacgatgtggaggagttccgtccagagcgttttgaaaatccaagtgcgattccgcagcatgcgtttaaaccgtttggaaacggtcagcgtgcgtgtatcggtcagcagttcgctcttcatgaagcaacgctggtacttggtatgatgctaaaacactttgactttgaagatcatacaaactacgagctcgatattaaagaaactttaacgttaaaacctgaaggctttgtggtaaaagcaaaatcgaaaaaaattccgcttggcggtattccttcacctagcactgaacagtctgctaaaaaagtacgcaaaaaggcagaaaacgctcataatacgccgctgcttgtgctatacggttcaaatgcgggaacagctgaaggaacggcgcgtgatttagcagatattgcaatgagcaaaggatttgcaccgcaggtcgcaacgcttgattcacacgccggaaatcttccgcgcgaaggagctgtattaattgtaacggcgtcttataacggtcatccgcctgataacgcaaagcaatttgtcgactggttagaccaagcgtctgctgatgaagtaaaaggcgttcgctactccgtatttggatgcggcgataaaaactgggctgcgacgtatcaaaaagtgcctgcttttatcgatgaaacgcttgccgctaaaggggcagaaaacatcgctgaccgcggtgaagcagatgcaagcgacgactttgaaggcacatatgaagaatggcgtgatcatatgtggagtgacgtagcagcctactttaacctcgacattgaaaacagtgaagataataaatctactctttcacttcaatttgtcgacagcgccgcggatatgccgcttgcgaaaatgcacggtgcgttttcaacgaacgtcgtagcaagcaaagaacttcaacagccaggcagtgcacgaagcacgcgacatcttgaaattgaacttccaaaagaagcttcttatcaagaaggagatcatttaggtgttattcctcgcaactatgaaggaatagtaaaccgtgtaacagcaaggttcggcctaagcgcatcacagcaaatccgtctggaagcagaagaagaaaaattagctcatttgccactcgctaaaacagtatccgtagaagagcttctgcaatacgtggagcttcaagatcctgttacgcgcacgcagcttcgcgcaatggctgctaaaacggtctgcccgccgcataaagtagagcttgaagccttgcttgaaaagcaagcctacaaagaacaagtgctggcaaaacgtttaacaatgcttgaactgcttgaaaaatacccggcgtgtgaaatgaaattcagcgaatttatcgcccttctgccaagcatacgcccgcgctattactcgatttcttcatcacctcgtgtcgatgaaaaacaagcaagcatcacggtcagcgttgtctcaggagaagcgtggagcggatatggagaatataaaggaattgcgtcgaactatcttgccgagctgcaagaaggagatacgattacgtgctttatttccacaccgcagtcagaatttacgctgccaaaagaccctgaaacgccgcttatcatggtcggaccgggaacaggcgtcgcgccgtttagaggctttgtgcaggcgcgcaaacagctaaaagaacaaggacagtcacttggagaagcacatttatacttcggctgccgttcacctcatgaagactatctgtatcaagaagagcttgaaaacgcccaaagcgaaggcatcattacgcttcataccgctttttctcgcatgccaaatcagccgaaaacatacgttcagcacgtaatggaacaagacggcaagaaattgattgaacttcttgatcaaggagcgcacttctatatttgcggagacggaagccaaatggcacctgccgttgaagcaacgcttatgaaaagctatgctgacgttcaccaagtgagtgaagcagacgctcgcttatggctgcagcagctagaagaaaaaggccgatacgcaaaagacgtgtgggctggg

SEQ ID NO: 54 - protein, 1049 aa, synthetic construct
  REGION 1..1049: note = Variant of cytochrome P450
MTIKEMPQPKTFGELKNLPLLNTDKPVQALMRIADELGEIFKFEAPGSVTRFLSSQRLIKEACDESRFDKNLSQALKFARDFLGDSLFTSWTHEPNWKKAHNILLPSFSQRAMKRYHAMMVDIAVQLVQKWERLNADEHIEVSEDMTRLTLDTIGLCGFNYRFNSFYRDQPHPFIVSMVRALDEVMNKLQRANPDDPAYDENKRQCQEDIKVMNDYVDKIIADRKARGEQSHDLLTQMLNGKDPETGEPLDDGNISYQIITFLIAGHETTSGLLSFALYFLVKNPHVLQKVAEEAARVLVDPVPSYKQVKQLKYVGMVLNEALRLWPTAPAFSLYAKEDTVLGGEYPLTKGDEVMVLIPQLHRDKTIWGDDVEEFRPERFENPSAIPQHAFKPFGNGQRACIGQQFALHEATLVLGMMLKHFDFEDHTNYELDIKETLTLKPEGFVVKAKSKKIPLGGIPSPSTEQSAKKVRKKAENAHNTPLLVLYGSNAGTAEGTARDLADIAMSKGFAPQVATLDSHAGNLPREGAVLIVTASYNGHPPDNAKQFVDWLDQASADEVKGVRYSVFGCGDKNWAATYQKVPAFIDETLAAKGAENIADRGEADASDDFEGTYEEWRDHMWSDVAAYFNLDIENSEDNKSTLSLQFVDSAADMPLAKMHGAFSTNVVASKELQQPGSARSTRHLEIELPKEASYQEGDHLGVIPRNYEGIVNRVTARFGLSASQQIRLEAEEEKLAHLPLAKTVSVEELLQYVELQDPVTRTQLRAMAAKTVCPPHKVELEALLEKQAYKEQVLAKRLTMLELLEKYPACEMKFSEFIALLPSIRPRYYSISSSPRVDEKQASITVSVVSGEAWSGYGEYKGIASNYLAELQEGDTITCFISTPQSEFTLPKDPETPLIMVGPGTGVAPFRGFVQARKQLKEQGQSLGEAHLYFGCRSPHEDYLYQEELENAQSEGIITLHTAFSRMPNQPKTYVQHVMEQDGKKLIELLDQGAHFYICGDGSQMAPAVEATLMKSYADVHQVSEADARLWLQQLEEKGRYAKDVWAG

SEQ ID NO: 55 - DNA, 3147 bp, synthetic construct
  misc_feature 1..3147: note = Variant of cytochrome P450
  source 1..3147: mol_type = other DNA
atgacaataaaggaaatgccgcagccgaaaacgtttggagaacttaaaaatttaccgttattaaacacagataaaccggttcaagctttgatgcgtattgcggatgaattaggagaaatctttaaattcgaggcgcctggtagcgtaacgcgctttttatcaagtcagcgtctaattaaagaagcatgcgatgaatcacgctttgataaaaacttaagtcaagcgcttaaatttgcacgtgattttcttggagacgggttatttacaagctggacgcatgaaccgaattggaaaaaagcgcataatatcttacttccaagctttagtcagcgtgcaatgaaacgttatcatgcgatgatggtcgatatcgccgtgcagcttgttcaaaagtgggagcgtctaaatgcagatgagcatattgaagtatcggaagacatgacacgtttaacgcttgatacaattggtctttgcggctttaactatcgctttaacagcttttaccgagatcagcctcatccatttattgtgagtatggtccgtgcactggatgaagtaatgaacaagctgcagcgagcaaatccagacgacccagcttatgatgaaaacaagcgccagtgtcaagaagatatcaaggtgatgaacgactatgtagataaaattattgcagatcgcaaagcaaggggtgaacaaagccatgatttattaacgcagatgctaaacggaaaagatccagaaacgggtgagccgcttgatgacgggaacattagctatcaaattattacattcttaattgcgggacacgaaacaacaagtggtcttttatcatttgcgctgtatttcttagtgaaaaatccacatgtattacaaaaagtagcagaagaagcagcacgagttctagtagatcctgttccaagctacaaacaagtcaaacagcttaaatatgtcggcatggtcttaaacgaagcgctgcgcttatggccaactgctcctgcgttttccctatatgcaaaagaagatacggtgcttggaggagaatatcctttaaccaaaggcgacgaagtaatggttctgattcctcagcttcaccgtgataaaacaatttggggagacgatgtggaggagttccgtccagagcgttttgaaaatccaagtgcgattccgcagcatgcgtttaaaccgtttggaaacggtcagcgtgcgtgtatcggtcagcagttcgctcttcatgaagcaacgctggtacttggtatgatgctaaaacactttgactttgaagatcatacaaactacgagctcgatgtgaaagaaactttaacgttaaaacctgaaggctttgtggtaaaagcaaaatcgaaaaaaattccgcttggcggtattccttcacctagcactgaacagtctgctaaaaaagtacgcaaaaaggcagaaaacgctcataatacgccgctgcttgtgctatacggttcaaatgcgggaacagctgaaggaacggcgcgtgatttagcagatattgcaatgagcaaaggatttgcaccgcaggtcgcaacgcttgattcacacgccggaaatcttccgcgcgaaggagctgtattaattgtaacggcgtcttataacggtcatccgcctgataacgcaaagcaatttgtcgactggttagaccaagcgtctgctgatgaagtaaaaggcgttcgctactccgtatttggatgcggcgataaaaactgggctgcgacgtatcaaaaagtgcctgcttttatcgatgaaacgcttgccgctaaaggggcagaaaacatcgctgaccgcggtgaagcagatgcaagcgacgactttgaaggcacatatgaagaatggcgtgatcatatgtggagtgacgtagcagcctactttaacctcgacattgaaaacagtgaagataataaatctactctttcacttcaatttgtcgacagcgccgcggatatgccgcttgcgaaaatgcacggtgcgttttcaacgaacgtcgtagcaagcaaagaacttcaacagccaggcagtgcacgaagcacgcgacatcttgaaattgaacttccaaaagaagcttcttatcaagaaggagatcatttaggtgttattcctcgcaactatgaaggaatagtaaaccgtgtaacagcaaggttcggcctaagcgcatcacagcaaatccgtctggaagcagaagaagaaaaattagctcatttgccactcgctaaaacagtatccgtagaagagcttctgcaatacgtggagcttcaagatcctgttacgcgcacgcagcttcgcgcaatggctgctaaaacggtctgcccgccgcataaagtagagcttgaagccttgcttgaaaagcaagcctacaaagaacaagtgctggcaaaacgtttaacaatgcttgaactgcttgaaaaatacccggcgtgtgaaatgaaattcagcgaatttatcgcccttctgccaagcatacgcccgcgctattactcgatttcttcatcacctcgtgtcgatgaaaaacaagcaagcatcacggtcagcgttgtctcaggagaagcgtggagcggatatggagaatataaaggaattgcgtcgaactatcttgccgagctgcaagaaggagatacgattacgtgctttatttccacaccgcagtcagaatttacgctgccaaaagaccctgaaacgccgcttatcatggtcggaccgggaacaggcgtcgcgccgtttagaggctttgtgcaggcgcgcaaacagctaaaagaacaaggacagtcacttggagaagcacatttatacttcggctgccgttcacctcatgaagactatctgtatcaagaagagcttgaaaacgcccaaagcgaaggcatcattacgcttcataccgctttttctcgcatgccaaatcagccgaaaacatacgttcagcacgtaatggaacaagacggcaagaaattgattgaacttcttgatcaaggagcgcacttctatatttgcggagacggaagccaaatggcacctgccgttgaagcaacgcttatgaaaagctatgctgacgttcaccaagtgagtgaagcagacgctcgcttatggctgcagcagctagaagaaaaaggccgatacgcaaaagacgtgtgggctggg

SEQ ID NO: 56 - protein, 1049 aa, synthetic construct
  REGION 1..1049: note = Variant of cytochrome P450
MTIKEMPQPKTFGELKNLPLLNTDKPVQALMRIADELGEIFKFEAPGSVTRFLSSQRLIKEACDESRFDKNLSQALKFARDFLGDGLFTSWTHEPNWKKAHNILLPSFSQRAMKRYHAMMVDIAVQLVQKWERLNADEHIEVSEDMTRLTLDTIGLCGFNYRFNSFYRDQPHPFIVSMVRALDEVMNKLQRANPDDPAYDENKRQCQEDIKVMNDYVDKIIADRKARGEQSHDLLTQMLNGKDPETGEPLDDGNISYQIITFLIAGHETTSGLLSFALYFLVKNPHVLQKVAEEAARVLVDPVPSYKQVKQLKYVGMVLNEALRLWPTAPAFSLYAKEDTVLGGEYPLTKGDEVMVLIPQLHRDKTIWGDDVEEFRPERFENPSAIPQHAFKPFGNGQRACIGQQFALHEATLVLGMMLKHFDFEDHTNYELDVKETLTLKPEGFVVKAKSKKIPLGGIPSPSTEQSAKKVRKKAENAHNTPLLVLYGSNAGTAEGTARDLADIAMSKGFAPQVATLDSHAGNLPREGAVLIVTASYNGHPPDNAKQFVDWLDQASADEVKGVRYSVFGCGDKNWAATYQKVPAFIDETLAAKGAENIADRGEADASDDFEGTYEEWRDHMWSDVAAYFNLDIENSEDNKSTLSLQFVDSAADMPLAKMHGAFSTNVVASKELQQPGSARSTRHLEIELPKEASYQEGDHLGVIPRNYEGIVNRVTARFGLSASQQIRLEAEEEKLAHLPLAKTVSVEELLQYVELQDPVTRTQLRAMAAKTVCPPHKVELEALLEKQAYKEQVLAKRLTMLELLEKYPACEMKFSEFIALLPSIRPRYYSISSSPRVDEKQASITVSVVSGEAWSGYGEYKGIASNYLAELQEGDTITCFISTPQSEFTLPKDPETPLIMVGPGTGVAPFRGFVQARKQLKEQGQSLGEAHLYFGCRSPHEDYLYQEELENAQSEGIITLHTAFSRMPNQPKTYVQHVMEQDGKKLIELLDQGAHFYICGDGSQMAPAVEATLMKSYADVHQVSEADARLWLQQLEEKGRYAKDVWAG

SEQ ID NO: 57 - DNA, 3147 bp, synthetic construct
  misc_feature 1..3147: note = Variant of cytochrome P450
  source 1..3147: mol_type = other DNA
atgacaataaaggaaatgccgcagccgaaaacgtttggagaacttaaaaatttaccgttattaaacacagataaaccggttcaagctttgatgcgtattgcggatgaattaggagaaatctttaaattcgaggcgcctggtagcgtaacgcgctttttatcaagtcagcgtctaattaaagaagcatgcgatgaatcacgctttgataaaaacttaagtcaagcgcttaaatttgcacgtgattttcttggagacgggttatttacaagctggacgcatgaaccgaattggaaaaaagcgcataatatcttacttccaagctttagtcagcgtgcaatgaaacgttatcatgcgatgatggtcgatatcgccgtgcagcttgttcaaaagtgggagcgtctaaatgcagatgagcatattgaagtatcggaagacatgacacgtttaacgcttgatacaattggtctttgcggctttaactatcgctttaacagcttttaccgagatcagcctcatccatttattgtgagtatgttgcgtgcactggatgaagtaatgaacaagctgcagcgagcaaatccagacgacccagcttatgatgaaaacaagcgccagtgtcaagaagatatcaaggtgatgaacgactatgtagataaaattattgcagatcgcaaagcaaggggtgaacaaagccatgatttattaacgcagatgctaaacggaaaagatccagaaacgggtgagccgcttgatgacgggaacattagctatcaaattattacattcttaattgcgggacacgaaacaacaagtggtcttttatcatttgcgctgtatttcttagtgaaaaatccacatgtattacaaaaagtagcagaagaagcagcacgagttctagtagatcctgttccaagctacaaacaagtcaaacagcttaaatatgtcggcatggtcttaaacgaagcgctgcgcttatggccaactgctcctgcgttttccctatatgcaaaagaagatacggtgcttggaggagaatatcctttaaccaaaggcgacgaagtaatggttctgattcctcagcttcaccgtgataaaacaatttggggagacgatgtggaggagttccgtccagagcgttttgaaaatccaagtgcgattccgcagcatgcgtttaaaccgtttggaaacggtcagcgtgcgtgtatcggtcagcagttcgctcttcatgaagcaacgctggtacttggtatgatgctaaaacactttgactttgaagatcatacaaactacgagctcgatattaaagaaactttaacgttaaaacctgaaggctttgtggtaaaagcaaaatcgaaaaaaattccgcttggcggtattccttcacctagcactgaacagtctgctaaaaaagtacgcaaaaaggcagaaaacgctcataatacgccgctgcttgtgctatacggttcaaatgcgggaacagctgaaggaacggcgcgtgatttagcagatattgcaatgagcaaaggatttgcaccgcaggtcgcaacgcttgattcacacgccggaaatcttccgcgcgaaggagctgtattaattgtaacggcgtcttataacggtcatccgcctgataacgcaaagcaatttgtcgactggttagaccaagcgtctgctgatgaagtaaaaggcgttcgctactccgtatttggatgcggcgataaaaactgggctgcgacgtatcaaaaagtgcctgcttttatcgatgaaacgcttgccgctaaaggggcagaaaacatcgctgaccgcggtgaagcagatgcaagcgacgactttgaaggcacatatgaagaatggcgtgatcatatgtggagtgacgtagcagcctactttaacctcgacattgaaaacagtgaagataataaatctactctttcacttcaatttgtcgacagcgccgcggatatgccgcttgcgaaaatgcacggtgcgttttcaacgaacgtcgtagcaagcaaagaacttcaacagccaggcagtgcacgaagcacgcgacatcttgaaattgaacttccaaaagaagcttcttatcaagaaggagatcatttaggtgttattcctcgcaactatgaaggaatagtaaaccgtgtaacagcaaggttcggcctaagcgcatcacagcaaatccgtctggaagcagaagaagaaaaattagctcatttgccactcgctaaaacagtatccgtagaagagcttctgcaatacgtggagcttcaagatcctgttacgcgcacgcagcttcgcgcaatggctgctaaaacggtctgcccgccgcataaagtagagcttgaagccttgcttgaaaagcaagcctacaaagaacaagtgctggcaaaacgtttaacaatgcttgaactgcttgaaaaatacccggcgtgtgaaatgaaattcagcgaatttatcgcccttctgccaagcatacgcccgcgctattactcgatttcttcatcacctcgtgtcgatgaaaaacaagcaagcatcacggtcagcgttgtctcaggagaagcgtggagcggatatggagaatataaaggaattgcgtcgaactatcttgccgagctgcaagaaggagatacgattacgtgctttatttccacaccgcagtcagaatttacgctgccaaaagaccctgaaacgccgcttatcatggtcggaccgggaacaggcgtcgcgccgtttagaggctttgtgcaggcgcgcaaacagctaaaagaacaaggacagtcacttggagaagcacatttatacttcggctgccgttcacctcatgaagactatctgtatcaagaagagcttgaaaacgcccaaagcgaaggcatcattacgcttcataccgctttttctcgcatgccaaatcagccgaaaacatacgttcagcacgtaatggaacaagacggcaagaaattgattgaacttcttgatcaaggagcgcacttctatatttgcggagacggaagccaaatggcacctgccgttgaagcaacgcttatgaaaagctatgctgacgttcaccaagtgagtgaagcagacgctcgcttatggctgcagcagctagaagaaaaaggccgatacgcaaaagacgtgtgggctggg

SEQ ID NO: 58 - protein, 1049 aa, synthetic construct
  REGION 1..1049: note = Variant of cytochrome P450
MTIKEMPQPKTFGELKNLPLLNTDKPVQALMRIADELGEIFKFEAPGSVTRFLSSQRLIKEACDESRFDKNLSQALKFARDFLGDGLFTSWTHEPNWKKAHNILLPSFSQRAMKRYHAMMVDIAVQLVQKWERLNADEHIEVSEDMTRLTLDTIGLCGFNYRFNSFYRDQPHPFIVSMLRALDEVMNKLQRANPDDPAYDENKRQCQEDIKVMNDYVDKIIADRKARGEQSHDLLTQMLNGKDPETGEPLDDGNISYQIITFLIAGHETTSGLLSFALYFLVKNPHVLQKVAEEAARVLVDPVPSYKQVKQLKYVGMVLNEALRLWPTAPAFSLYAKEDTVLGGEYPLTKGDEVMVLIPQLHRDKTIWGDDVEEFRPERFENPSAIPQHAFKPFGNGQRACIGQQFALHEATLVLGMMLKHFDFEDHTNYELDIKETLTLKPEGFVVKAKSKKIPLGGIPSPSTEQSAKKVRKKAENAHNTPLLVLYGSNAGTAEGTARDLADIAMSKGFAPQVATLDSHAGNLPREGAVLIVTASYNGHPPDNAKQFVDWLDQASADEVKGVRYSVFGCGDKNWAATYQKVPAFIDETLAAKGAENIADRGEADASDDFEGTYEEWRDHMWSDVAAYFNLDIENSEDNKSTLSLQFVDSAADMPLAKMHGAFSTNVVASKELQQPGSARSTRHLEIELPKEASYQEGDHLGVIPRNYEGIVNRVTARFGLSASQQIRLEAEEEKLAHLPLAKTVSVEELLQYVELQDPVTRTQLRAMAAKTVCPPHKVELEALLEKQAYKEQVLAKRLTMLELLEKYPACEMKFSEFIALLPSIRPRYYSISSSPRVDEKQASITVSVVSGEAWSGYGEYKGIASNYLAELQEGDTITCFISTPQSEFTLPKDPETPLIMVGPGTGVAPFRGFVQARKQLKEQGQSLGEAHLYFGCRSPHEDYLYQEELENAQSEGIITLHTAFSRMPNQPKTYVQHVMEQDGKKLIELLDQGAHFYICGDGSQMAPAVEATLMKSYADVHQVSEADARLWLQQLEEKGRYAKDVWAG

SEQ ID NO: 59 - DNA, 3147 bp, synthetic construct
  misc_feature 1..3147: note = Variant of cytochrome P450
  source 1..3147: mol_type = other DNA
atgacaataaaggaaatgccgcagccgaaaacgtttggagaacttaaaaatttaccgttattaaacacagataaaccggttcaagctttgatgcgtattgcggatgaattaggagaaatctttaaattcgaggcgcctggtagcgtaacgcgctttttatcaagtcagcgtctaattaaagaagcatgcgatgaatcacgctttgataaaaacttaagtcaagcgcttaaatttgcacgtgattttcttggagacgggttatttacaagctggacgcatgaaccgaattggaaaaaagcgcataatatcttactgccaagctttagtcagcgtgcaatgaaacgttatcatgcgatgatggtcgatatcgccgtgcagcttgttcaaaagtgggagcgtctaaatgcagatgagcatattgaagtatcggaagacatgacacgtttaacgcttgatacaattggtctttgcggctttaactatcgctttaacagcttttaccgagatcagcctcatccatttattgtgagtatggtccgtgcactggatgaagtaatgaacaagctgcagcgagcaaatccagacgacccagcttatgatgaaaacaagcgccagtgtcaagaagatatcaaggtgatgaacgactatgtagataaaattattgcagatcgcaaagcaaggggtgaacaaagccatgatttattaacgcagatgctaaacggaaaagatccagaaacgggtgagccgcttgatgacgggaacattagctatcaaattattacattcttaattgcgggacacgaaacaacaagtggtcttttatcatttgcgctgtatttcttagtgaaaaatccacatgtattacaaaaagtagcagaagaagcagcacgagttctagtagatcctgttccaagctacaaacaagtcaaacagcttaaatatgtcggcatggtcttaaacgaagcgctgcgcttatggccaactgctcctgcgttttccctatatgcaaaagaagatacggtgcttggaggagaatatcctttaaccaaaggcgacgaagtaatggttctgattcctcagcttcaccgtgataaaacaatttggggagacgatgtggaggagttccgtccagagcgttttgaaaatccaagtgcgattccgcagcatgcgtttaaaccgtttggaaacggtcagcgtgcgtgtatcggtcagcagttcgctcttcatgaagcaacgctggtacttggtatgatgctaaaacactttgactttgaagatcatacaaactacgagctcgatattaaagaaactttaacgttaaaacctgaaggctttgtggtaaaagcaaaatcgaaaaaaattccgcttggcggtattccttcacctagcactgaacagtctgctaaaaaagtacgcaaaaaggcagaaaacgctcataatacgccgctgcttgtgctatacggttcaaatgcgggaacagctgaaggaacggcgcgtgatttagcagatattgcaatgagcaaaggatttgcaccgcaggtcgcaacgcttgattcacacgccggaaatcttccgcgcgaaggagctgtattaattgtaacggcgtcttataacggtcatccgcctgataacgcaaagcaatttgtcgactggttagaccaagcgtctgctgatgaagtaaaaggcgttcgctactccgtatttggatgcggcgataaaacctgggctgcgacgtatcaaaaagtgcctgcttttatcgatgaaacgcttgccgctaaaggggcagaaaacatcgctcgccgcggtgaagcagatgcaagcgacgactttgaaggcacatatgaagaatggcgtgatcatatgtggagtgacgtagcagcctactttaacctcgacattgaaaacagtgaagataataaatctactctttcacttcaatttgtcgacagcgccgcggatatgccgcttgcgaaaatgcacggtgcgttttcaacgaacgtcgtagcaagcaaagaacttcaacagccaggcagtgcacgaagcacgcgacatctggaaattgaacttccaaaagaagcttcttatcaagaaggagatcatttaggtgttattcctcgcaactatgaaggaatagtaaaccgtgtaacagcaaggttcggcctaagcgcatcacagcaaatccgtctggaagcagaagaagaaaaattagctcatttgccactcgctaaaacagtatccgtactggagcttctgcaatacgtggagcttcaagatcctgttacgcgcacgcagcttcgcgcaatggctgctaaaacggtctgcccgccgcataaagtagagcttgaagccttgcttgaaaagcaagcctacaaagaacaagtgctggcaaaacgtttaacaatgcttgaactgcttgaaaaatacccggcgtgtgaaatgaaattcagcgaatttatcgcccttctgccaagcatacgcccgcgctattactcgatttcttcatcacctcgtgtcgatgaaaaacaagcaagcatcacggtcagcgttgtctcaggagaagcgtggagcggatatggagaatataaaggaattgcgtcgaactatcttgccgagctgcaagaaggagatacgattacgtgctttatttccacaccgcagtcagaatttacgctgccaaaagaccctgaaacgccgcttatcatggtcggaccgggaacaggcgtcgcgccgtttagaggctttgtgcaggcgcgcaaacagctaaaagaacaaggacagtcacttggagaagcacatttatacttcggctgccgttcacctcatgaagactatctgtatcaagaagagcttgaaaacgcccaaagcgaaggcatcattacgcttcataccgctttttctcgcatgccaaatcagccgaaaacatacgttcagcacgtaatggaacaagacggcaagaaattgattgaacttcttgatcaaggagcgcacttctatatttgcggagacggaagccaaatggcacctgccgttgaagcaacgcttatgaaaagctatgctgacgttcaccaagtgagtgaagcagacgctcgcttatggctgcagcagctagaagaaaaaggccgatacgcaaaagacgtgtgggctggg

SEQ ID NO: 60 - protein, 1049 aa, synthetic construct
  REGION 1..1049: note = Variant of cytochrome P450
MTIKEMPQPKTFGELKNLPLLNTDKPVQALMRIADELGEIFKFEAPGSVTRFLSSQRLIKEACDESRFDKNLSQALKFARDFLGDGLFTSWTHEPNWKKAHNILLPSFSQRAMKRYHAMMVDIAVQLVQKWERLNADEHIEVSEDMTRLTLDTIGLCGFNYRFNSFYRDQPHPFIVSMVRALDEVMNKLQRANPDDPAYDENKRQCQEDIKVMNDYVDKIIADRKARGEQSHDLLTQMLNGKDPETGEPLDDGNISYQIITFLIAGHETTSGLLSFALYFLVKNPHVLQKVAEEAARVLVDPVPSYKQVKQLKYVGMVLNEALRLWPTAPAFSLYAKEDTVLGGEYPLTKGDEVMVLIPQLHRDKTIWGDDVEEFRPERFENPSAIPQHAFKPFGNGQRACIGQQFALHEATLVLGMMLKHFDFEDHTNYELDIKETLTLKPEGFVVKAKSKKIPLGGIPSPSTEQSAKKVRKKAENAHNTPLLVLYGSNAGTAEGTARDLADIAMSKGFAPQVATLDSHAGNLPREGAVLIVTASYNGHPPDNAKQFVDWLDQASADEVKGVRYSVFGCGDKTWAATYQKVPAFIDETLAAKGAENIARRGEADASDDFEGTYEEWRDHMWSDVAAYFNLDIENSEDNKSTLSLQFVDSAADMPLAKMHGAFSTNVVASKELQQPGSARSTRHLEIELPKEASYQEGDHLGVIPRNYEGIVNRVTARFGLSASQQIRLEAEEEKLAHLPLAKTVSVLELLQYVELQDPVTRTQLRAMAAKTVCPPHKVELEALLEKQAYKEQVLAKRLTMLELLEKYPACEMKFSEFIALLPSIRPRYYSISSSPRVDEKQASITVSVVSGEAWSGYGEYKGIASNYLAELQEGDTITCFISTPQSEFTLPKDPETPLIMVGPGTGVAPFRGFVQARKQLKEQGQSLGEAHLYFGCRSPHEDYLYQEELENAQSEGIITLHTAFSRMPNQPKTYVQHVMEQDGKKLIELLDQGAHFYICGDGSQMAPAVEATLMKSYADVHQVSEADARLWLQQLEEKGRYAKDVWAG

SEQ ID NO: 61 - DNA, 3147 bp, synthetic construct
  misc_feature 1..3147: note = Variant of cytochrome P450
  source 1..3147: mol_type = other DNA
atgacaataaaggaaatgccgcagccgaaaacgtttggagaacttaaaaatttaccgttattaaacacagataaaccggttcaagctttgatgcgtattgcggatgaattaggagaaatctttaaattcgaggcgcctggtagcgtaacgcgctttttatcaagtcagcgtctaattaaagaagcatgcgatgaatcacgctttgataaaaacttaagtcaagcgcttaaatttgcacgtgattttcttggagacgggttatttacaagctggacgcatgaaccgaattggaaaaaagcgcataatatcttaggcccaagctttagtcagcgtgcaatgaaacgttatcatgcgatgatggtcgatatcgccgtgcagcttgttcaaaagtgggagcgtctaaatgcagatgagcatattgaagtatcggaagacatgacacgtttaacgcttgatacaattggtctttgcggctttaactatcgctttaacagcttttaccgagatcagcctcatccatttattgtgagtatggtccgtgcactggatgaagtaatgaacaagctgcagcgagcaaatccagacgacccagcttatgatgaaaacaagcgccagtgtcaagaagatatcaaggtgatgaacgactatgtagataaaattattgcagatcgcaaagcaaggggtgaacaaagccatgatttattaacgcagatgctaaacggaaaagatccagaaacgggtgagccgcttgatgacgggaacattagttatcaaattattacattcttaattgcgggacacgaaacaacaagtggtcttttatcatttgcgctgtatttcttagtgaaaaatccacatgtattacaaaaagtagcagaagaagcagcacgagttctagtagatcctgttccaagctacaaacaagtcaaacagcttaaatatgtcggcatggtcttaaacgaagcgctgcgcttatggccaactgctcctgcgttttccctatatgcaaaagaagatacggtgcttggaggagaatatcctttaaccaaaggcgacgaagtaatggttctgattcctcagcttcaccgtgataaaacaatttggggagacgatgtggaggagttccgtccagagcgttttgaaaatccaagtgcgattccgcagcatgcgtttaaaccgtttggaaacggtcagcgtgcgtgtatcggtcagcagttcgctcttcatgaagcaacgctggtacttggtatgatgctaaaacactttgactttgaagatcatacaaactacgagctcgatattaaagaaactttaacgttaaaacctgaaggctttgtggtaaaagcaaaatcgaaaggcattccgcttggcggtattccttcacctagcactgaacagtctgctaaaaaagtacgcaaaaaggcagaaaacgctcataatacgccgctgcttgtgctatacggttcaaatgcgggaacagctgaaggaacggcgcgtgatttagcagatattgcaatgagcaaaggatttgcaccgcaggtcgcaacgcttgattcacacgccggaaatcttccgcgcgaaggagctgtattaattgtaacggcgtcttataacggtcatccgcctgataacgcaaagcaatttgtcgactggttagaccaagcgtctgctgatgaagtaaaaggcgttcgctactccgtatttggatgcggcgataaaacctgggctgcgacgtatcaaaaagtgcctgcttttatcgatgaaacgcttgccgctaaaggggcagaaaacatcgctgaccgcggtgaagcagatgcaagcgacgactttgaaggcacatatgaagaatggcgtgatcatatgtggagtgacgtagcagcctactttaacctcgacattgaaaacagtgaagataataaatctactctttcacttcaatttgtcgacagcgccgcggatatgccgcttgcgaaaatgcacggtgcgttttcaacgaacgtcgtagcaagcaaagaacttcaacagccaggcagtgcacgaagcacgcgacatcttgaaattgaacttccaaaagaagcttcttatcaagaaggagatcatttaggtgttattcctcgcaactatgaaggaatagtaaaccgtgtaacagcaaggttcggcctaagcgcatcacagcaaatccgtctggaagcagaagaagaaaaattagctcatttgccactcgctaaaacagtatccgtagaggagcttctgcaatacgtggagcttcaagatcctgttacgcgcacgcagcttcgcgcaatggctgctaaaacggtctgcccgccgcataaagtagagcttgaagccttgcttgaaaagcaagcctacaaagaacaagtgctggcaaaacgtttaacaatgcttgaactgcttgaaaaatacccggcgtgtgaaatgaaattcagcgaatttatcgcccttctgccaagcatccgcccgcgctattactcgatttcttcatcacctcgtgtcgatgaaaaacaagcaagcatcacggtcagcgttgtctcaggagaagcgtggagcggatatggagaatataaaggaattgcgtcgaactatcttgccgagctgcaagaaggagatacgattacgtgctttatttccacaccgcagtcagaatttacgctgccaaaagaccctgaaacgccgcttatcatggtcggaccgggaacaggcgtcgcgccgtttagaggctttgtgcaggcgcgcaaacagctaaaagaacaaggacagtcacttggagaagcacatttatacttcggctgccgttcacctcatgaagactatctgtatcaagaagagcttgaaaacgcccaaagcgaaggcatcattacgcttcataccgctttttctcgcatgccaaatcagccgaaaacatacgttcagcacgtaatggaacaagacggcaagaaattgattgaacttcttgatcaaggagcgcacttctatatttgcggagacggaagccaaatggcacctgccgttgaagcaacgcttatgaaaagctatgctgacgttcaccaagtgagtgaagcagacgctcgcttatggctgcagcagctagaagaaaaaggccgatacgcaaaagacgtgtgggctggg

SEQ ID NO: 62 - protein, 1049 aa, synthetic construct
  REGION 1..1049: note = Variant of cytochrome P450
MTIKEMPQPKTFGELKNLPLLNTDKPVQALMRIADELGEIFKFEAPGSVTRFLSSQRLIKEACDESRFDKNLSQALKFARDFLGDGLFTSWTHEPNWKKAHNILGPSFSQRAMKRYHAMMVDIAVQLVQKWERLNADEHIEVSEDMTRLTLDTIGLCGFNYRFNSFYRDQPHPFIVSMVRALDEVMNKLQRANPDDPAYDENKRQCQEDIKVMNDYVDKIIADRKARGEQSHDLLTQMLNGKDPETGEPLDDGNISYQIITFLIAGHETTSGLLSFALYFLVKNPHVLQKVAEEAARVLVDPVPSYKQVKQLKYVGMVLNEALRLWPTAPAFSLYAKEDTVLGGEYPLTKGDEVMVLIPQLHRDKTIWGDDVEEFRPERFENPSAIPQHAFKPFGNGQRACIGQQFALHEATLVLGMMLKHFDFEDHTNYELDIKETLTLKPEGFVVKAKSKGIPLGGIPSPSTEQSAKKVRKKAENAHNTPLLVLYGSNAGTAEGTARDLADIAMSKGFAPQVATLDSHAGNLPREGAVLIVTASYNGHPPDNAKQFVDWLDQASADEVKGVRYSVFGCGDKTWAATYQKVPAFIDETLAAKGAENIADRGEADASDDFEGTYEEWRDHMWSDVAAYFNLDIENSEDNKSTLSLQFVDSAADMPLAKMHGAFSTNVVASKELQQPGSARSTRHLEIELPKEASYQEGDHLGVIPRNYEGIVNRVTARFGLSASQQIRLEAEEEKLAHLPLAKTVSVEELLQYVELQDPVTRTQLRAMAAKTVCPPHKVELEALLEKQAYKEQVLAKRLTMLELLEKYPACEMKFSEFIALLPSIRPRYYSISSSPRVDEKQASITVSVVSGEAWSGYGEYKGIASNYLAELQEGDTITCFISTPQSEFTLPKDPETPLIMVGPGTGVAPFRGFVQARKQLKEQGQSLGEAHLYFGCRSPHEDYLYQEELENAQSEGIITLHTAFSRMPNQPKTYVQHVMEQDGKKLIELLDQGAHFYICGDGSQMAPAVEATLMKSYADVHQVSEADARLWLQQLEEKGRYAKDVWAG

SEQ ID NO: 63 - DNA, 3147 bp, synthetic construct
  misc_feature 1..3147: note = Variant of cytochrome P450
  source 1..3147: mol_type = other DNA
atgacaataaaggaaatgccgcagccgaaaacgtttggagaacttaaaaatttaccgttattaaacacagataaaccggttcaagctttgatgcgtattgcggatgaattaggagaaatctttaaattcgaggcgcctggtagcgtaacgcgctttttatcaagtcagcgtctaattaaagaagcatgcgatgaatcacgctttgataaaaacttaagtcaagcgcttaaatttgcacgtgattttcttggagacgggttatttacaagctggacgcatgaaccgaattggaaaaaagcgcataatatcttactgccaagctttagtcagcgtgcaatgaaacgttatcatgcgatgatggtcgatatcgccgtgcagcttgttcaaaagtgggagcgtctaaatgcagatgagcatattgaagtatcggaagacatgacacgtttaacgcttgatacaattggtctttgcggctttaactatcgctttaacagcttttaccgagatcagcctcatccatttattgtgagtatggtccgtgcactggatgaagtaatgaacaagctgcagcgagcaaatccagacgacccagcttatgatgaaaacaagcgccagtgtcaagaagatatcaaggtgatgaacgactatgtagataaaattattgcagatcgcaaagcaaggggtgaacaaagccatgatttattaacgcagatgctaaacggaaaagatccagaaacgggtgagccgcttgatgacgggaacattagttatcaaattattacattcttaattgcgggacacgaaacaacaagtggtcttttatcatttgcgctgtatttcttagtgaaaaatccacatgtattacaaaaagtagcagaagaagcagcacgagttctagtagatcctgttccaagctacaaacaagtcaaacagcttaaatatgtcggcatggtcttaaacgaagcgctgcgcttatggccaactgctcctgcgttttccctatatgcaaaagaagatacggtgcttggaggagaatatcctttaaccaaaggcgacgaagtaatggttctgattcctcagcttcaccgtgataaaacaatttggggagacgatgtggaggagttccgtccagagcgttttgaaaatccaagtgcgattccgcagcatgcgtttaaaccgtttggaaacggtcagcgtgcgtgtatcggtcagcagttcgctcttcatgaagcaacgctggtacttggtatgatgctaaaacactttgactttgaagatcatacaaactacgagctcgatattaaagaaactttaacgttaaaacctgaaggctttgtggtaaaagcaaaatcgaaaaagattccgcttggcggtattccttcacctagcactgaacagtctgctaaaaaagtacgcaaaaaggcagaaaacgctcataatacgccgctgcttgtgctatacggttcaaatgcgggaacagctgaaggaacggcgcgtgatttagcagatattgcaatgagcaaaggatttgcaccgcaggtcgcaacgcttgattcacacgccggaaatcttccgcgcgaaggagctgtattaattgtaacggcgtcttataacggtcatccgcctgataacgcaaagcaatttgtcgactggttagaccaagcgtctgctgatgaagtaaaaggcgttcgctactccgtatttggatgcggcgataaaaactgggctgcgacgtatcaaaaagtgcctgcttttatcgatgaaacgcttgccgctaaaggggcagaaaacatcgctgatcgcggtgaagcagatgcaagcgacgactttgaaggcacatatgaagaatggcgtgatcatatgtggagtgacgtagcagcctactttaacctcgacattgaaaacagtgaagataataaatctactctttcacttcaatttgtcgacagcgccgcggatatgccgcttgcgaaaatgcacggtgcgttttcaacgaacgtcgtagcaagcaaagaacttcaacagccaggcagtgcacgaagcacgcgacatctggaaattgaacttccaaaagaagcttcttatcaagaaggagatcatttaggtgttattcctcgcaactatgaaggaatagtaaaccgtgtaacagcaaggttcggcctaagcgcatcacagcaaatccgttgcgaagcagaagaagaaaaattagctcatttgccactcgctaaaacagtatccgtagaagagcttctgcaatacgtggagcttcaagatcctgttacgcgcacgcagcttcgcgcaatggctgctaaaacggtctgcccgccgcataaagtagagcttgaagccttgcttgaaaagcaagcctacaaagaacaagtgctggcaaaacgtttaacaatgcttgaactgcttgaaaaatacccggcgtgtgaaatgaaattcagcgaatttatcgcccttctgccaagcatacgcccgcgctattactcgatttcttcatcacctcgtgtcgatgaaaaacaagcaagcatcacggtcagcgttgtctcaggagaagcgtggagcggatatggagaatataaaggaattgcgtcgaactatcttgccgagctgcaagaaggagatacgattacgtgctttatttccacaccgcagtcagaatttacgctgccaaaagaccctgaaacgccgcttatcatggtcggaccgggaacaggcgtcgcgccgtttagaggctttgtgcaggcgcgcaaacagctaaaagaacaaggacagtcacttggagaagcacatttatacttcggctgccgttcacctcatgaagactatctgtatcaagaagagcttgaaaacgcccaaagcgaaggcatcattacgcttcataccgctttttctcgcatgccaaatcagccgaaaacatacgttcagcacgtaatggaacaagacggcaagaaattgattgaacttcttgatcaaggagcgcacttctatatttgcggagacggaagccaaatggcacctgccgttgaagcaacgcttatgaaaagctatgctgacgttcaccaagtgagtgaagcagacgctcgcttatggctgcagcagctagaagaaaaaggccgatacgcaaaagacgtgtgggctggg

SEQ ID NO: 64 - protein, 1049 aa, synthetic construct
  REGION 1..1049: note = Variant of cytochrome P450
MTIKEMPQPKTFGELKNLPLLNTDKPVQALMRIADELGEIFKFEAPGSVTRFLSSQRLIKEACDESRFDKNLSQALKFARDFLGDGLFTSWTHEPNWKKAHNILLPSFSQRAMKRYHAMMVDIAVQLVQKWERLNADEHIEVSEDMTRLTLDTIGLCGFNYRFNSFYRDQPHPFIVSMVRALDEVMNKLQRANPDDPAYDENKRQCQEDIKVMNDYVDKIIADRKARGEQSHDLLTQMLNGKDPETGEPLDDGNISYQIITFLIAGHETTSGLLSFALYFLVKNPHVLQKVAEEAARVLVDPVPSYKQVKQLKYVGMVLNEALRLWPTAPAFSLYAKEDTVLGGEYPLTKGDEVMVLIPQLHRDKTIWGDDVEEFRPERFENPSAIPQHAFKPFGNGQRACIGQQFALHEATLVLGMMLKHFDFEDHTNYELDIKETLTLKPEGFVVKAKSKKIPLGGIPSPSTEQSAKKVRKKAENAHNTPLLVLYGSNAGTAEGTARDLADIAMSKGFAPQVATLDSHAGNLPREGAVLIVTASYNGHPPDNAKQFVDWLDQASADEVKGVRYSVFGCGDKNWAATYQKVPAFIDETLAAKGAENIADRGEADASDDFEGTYEEWRDHMWSDVAAYFNLDIENSEDNKSTLSLQFVDSAADMPLAKMHGAFSTNVVASKELQQPGSARSTRHLEIELPKEASYQEGDHLGVIPRNYEGIVNRVTARFGLSASQQIRCEAEEEKLAHLPLAKTVSVEELLQYVELQDPVTRTQLRAMAAKTVCPPHKVELEALLEKQAYKEQVLAKRLTMLELLEKYPACEMKFSEFIALLPSIRPRYYSISSSPRVDEKQASITVSVVSGEAWSGYGEYKGIASNYLAELQEGDTITCFISTPQSEFTLPKDPETPLIMVGPGTGVAPFRGFVQARKQLKEQGQSLGEAHLYFGCRSPHEDYLYQEELENAQSEGIITLHTAFSRMPNQPKTYVQHVMEQDGKKLIELLDQGAHFYICGDGSQMAPAVEATLMKSYADVHQVSEADARLWLQQLEEKGRYAKDVWAG

SEQ ID NO: 65 - DNA, 3147 bp, synthetic construct
  misc_feature 1..3147: note = Variant of cytochrome P450
  source 1..3147: mol_type = other DNA
atgacaataaaggaaatgccgcagccgaaaacgtttggagaacttaaaaatttaccgttattaaacacagataaaccggttcaagctttgatgcgtattgcggatgaattaggagaaatctttaaattcgaggcgcctggtagcgtaacgcgctttttatcaagtcagcgtctaattaaagaagcatgcgatgaatcacgctttgataaaaacttaagtcaatcgcttaaatttgcacgtgattttcttggagacgggttatttacaagctggacgcatgaaccgaattggaaaaaagcgcataatatcttacttccaagctttagtcagcgtgcaatgaaacgttatcatgcgatgatggtcgatatcgccgtgcagcttgttcaaaagtgggagcgtctaaatgcagatgagcatattgaagtatcggaagacatgacacgtttaacgcttgatacaattggtctttgcggctttaactatcgctttaacagcttttaccgagatcagcctcatccatttattgtgagtatggtccgtgcactggatgaagtaatgaacaagctgcagcgagcaaatccagacgacccagcttatgatgaaaacaagcgccagtgtcaagaagatatcaaggtgatgaacgactatgtagataaaattattgcagatcgcaaagcaaggggtgaacaaagccatgatttattaacgcagatgctaaacggaaaagatccagaaacgggtgagccgcttgatgacgggaacattagctatcaaattattacattcttaattgcgggacacgaaacaacaagtggtcttttatcatttgcgctgtatttcttagtgaaaaatccacatgtattacaaaaagtagcagaagaagcagcacgagttctagtagatcctgttccaagctacaaacaagtcaaacagcttaaatatgtcggcatggtcttaaacgaagcgctgcgcttatggccaactgctcctgcgttttccctatatgcaaaagaagatacggtgcttggaggagaatatcctttaaccaaaggcgacgaagtaatggttctgattcctcagcttcaccgtgataaaacaatttggggagacgatgtggaggagttccgtccagagcgttttgaaaatccaagtgcgattccgcagcatgcgtttaaaccgtttggaaacggtcagcgtgcgtgtatcggtcagcagttcgctcttcatgaagcaacgctggtacttggtatgatgctaaaacactttgactttgaagatcatacaaactacgagctcgatattaaagaaactttaacgttaaaacctgaaggctttgtggtaaaagcaaaatcgaaaaaaattccgcttggcggtattccttcacctagcactgaacagtctgctaaaaaagtacgcaaaaaggcagaaaacgctcataatacgccgctgcttgtgctatacggttcaaatgcgggaacagctgaaggaacggcgcgtgatttagcagatattgcaatgagcaaaggatttgcaccgcaggtcgcaacgcttgattcacacgccggaaatcttccgcgcgaaggagctgtattaattgtaacggcgtcttataacggtcatccgcctgataacgcaaagcaatttgtcgactggttagaccaagcgtctgctgatgaagtaaaaggcgttcgctactccgtatttggatgcggcgataaaaactgggctgcgacgtatcaaaaagtgcctgcttttatcgatgaaacgcttgccgctaaaggggcagaaaacatcgctgaccgcggtgaagcagatgcaagcgacgactttgaaggcacatatgaagaatggcgtgatcatatgtggagtgacgtagcagcctactttaacctcgacattgaaaacagtgaagataataaatctactctttcacttcaatttgtcgacagcgccgcggatatgccgcttgcgaaaatgcacggtgcgttttcaacgaacgtcgtagcaagcaaagaacttcaacagccaggcagtgcacgaagcacgcgacatcttgaaattgaacttccaaaagaagcttcttatcaagaaggagatcatttaggtgttattcctcgcaactatgaaggaatagtaaaccgtgtaacagcaaggttcggcctaagcgcatcacagcaaatccgtctggaagcagaagaagaaaaattagctcatttgccactcgctaaaacagtatccgtagaagagcttctgcaatacgtggagcttcaagatcctgttacgcgcacgcagcttcgcgcaatggctgctaaaacggtctgcccgccgcataaagtagagcttgaagccttgcttgaaaagcaagcctacaaagaacaagtgctggcaaaacgtttaacaatgcttgaactgcttgaaaaatacccggcgtgtgaaatgaaattcagcgaatttatcgcccttctgccaagcatacgcccgcgctattactcgatttcttcatcacctcgtgtcgatgaaaaacaagcaagcatcacggtcagcgttgtctcaggagaagcgtggagcggatatggagaatataaaggaattgcgtcgaactatcttgccgagctgcaagaaggagatacgattacgtgctttatttccacaccgcagtcagaatttacgctgccaaaagaccctgaaacgccgcttatcatggtcggaccgggaacaggcgtcgcgccgtttagaggctttgtgcaggcgcgcaaacagctaaaagaacaaggacagtcacttggagaagcacatttatacttcggctgccgttcacctcatgaagactatctgtatcaagaagagcttgaaaacgcccaaagcgaaggcatcattacgcttcataccgctttttctcgcatgccaaatcagccgaaaacatacgttcagcacgtaatggaacaagacggcaagaaattgattgaacttcttgatcaaggagcgcacttctatatttgcggagacggaagccaaatggcacctgccgttgaagcaacgcttatgaaaagctatgctgacgttcaccaagtgagtgaagcagacgctcgcttatggctgcagcagctagaagaaaaaggccgatacgcaaaagacgtgtgggctggg

SEQ ID NO: 66 - protein, 1049 aa, synthetic construct
  REGION 1..1049: note = Variant of cytochrome P450
MTIKEMPQPKTFGELKNLPLLNTDKPVQALMRIADELGEIFKFEAPGSVTRFLSSQRLIKEACDESRFDKNLSQSLKFARDFLGDGLFTSWTHEPNWKKAHNILLPSFSQRAMKRYHAMMVDIAVQLVQKWERLNADEHIEVSEDMTRLTLDTIGLCGFNYRFNSFYRDQPHPFIVSMVRALDEVMNKLQRANPDDPAYDENKRQCQEDIKVMNDYVDKIIADRKARGEQSHDLLTQMLNGKDPETGEPLDDGNISYQIITFLIAGHETTSGLLSFALYFLVKNPHVLQKVAEEAARVLVDPVPSYKQVKQLKYVGMVLNEALRLWPTAPAFSLYAKEDTVLGGEYPLTKGDEVMVLIPQLHRDKTIWGDDVEEFRPERFENPSAIPQHAFKPFGNGQRACIGQQFALHEATLVLGMMLKHFDFEDHTNYELDIKETLTLKPEGFVVKAKSKKIPLGGIPSPSTEQSAKKVRKKAENAHNTPLLVLYGSNAGTAEGTARDLADIAMSKGFAPQVATLDSHAGNLPREGAVLIVTASYNGHPPDNAKQFVDWLDQASADEVKGVRYSVFGCGDKNWAATYQKVPAFIDETLAAKGAENIADRGEADASDDFEGTYEEWRDHMWSDVAAYFNLDIENSEDNKSTLSLQFVDSAADMPLAKMHGAFSTNVVASKELQQPGSARSTRHLEIELPKEASYQEGDHLGVIPRNYEGIVNRVTARFGLSASQQIRLEAEEEKLAHLPLAKTVSVEELLQYVELQDPVTRTQLRAMAAKTVCPPHKVELEALLEKQAYKEQVLAKRLTMLELLEKYPACEMKFSEFIALLPSIRPRYYSISSSPRVDEKQASITVSVVSGEAWSGYGEYKGIASNYLAELQEGDTITCFISTPQSEFTLPKDPETPLIMVGPGTGVAPFRGFVQARKQLKEQGQSLGEAHLYFGCRSPHEDYLYQEELENAQSEGIITLHTAFSRMPNQPKTYVQHVMEQDGKKLIELLDQGAHFYICGDGSQMAPAVEATLMKSYADVHQVSEADARLWLQQLEEKGRYAKDVWAG

SEQ ID NO: 67 - DNA, 3147 bp, synthetic construct
  misc_feature 1..3147: note = Variant of cytochrome P450
  source 1..3147: mol_type = other DNA
atgacaataaaggaaatgccgcagccgaaaacgtttggagaacttaaaaatttaccgttattaaacacagataaaccggttcaagctttgatgcgtattgcggatgaattaggagaaatctttaaattcgaggcgcctggtagcgtaacgcgctttttatcaagtcagcgtctaattaaagaagcatgcgatgaatcacgctttgataaaaacttaagtcaagcgcttaaatttgcacgtgattttcttggagacgggttatttacaagctggacgcatgaaccgaattggaaaaaagcgcataatatcttacttccaagctttagtcagcgtgcaatgaaacgttatcatgcgatgatggtcgatatcgccgtgcagcttgttcaaaagtgggagcgtctaaatgcagatgagcatattgaagtatcggaagacatgacacgtttaacgcttgatacaattggtctttgcggctttaactatcgctttaacagcttttaccgagatcagcctcatccatttattgtgagtatggtccgtgcactggatgaagtaatgaacaagctgcagcgagcaaatccagacgacccagcttatgatgaaaacaagcgccagtgtcaagaagatatcaaggtgatgaacgactatgtagataaaattattgcagatcgcaaagcaaggggtgaacaaagccatgatttattaacgcagatgctaaacggaaaagatccagaaacgggtgagccgcttgatgacgggaacattagctatcaaattattacattcttaattgcgggacacgaaacaacaagtggtcttttatcatttgcgctgtatttcttagtgaaaaatccacatgtattacaaaaagtagcagaagaagcagcacgagttctagtagatcctgttccaagctacaaacaagtcaaacagcttaaatatgtcggcatggtcttaaacgaagcgctgcgcttatggccaactgctcctgcgttttccctatatgcaaaagaagatacggtgcttggaggagaatatcctttaaccaaaggcgacgaagtaatggttctgattcctcagcttcaccgtgataaaacaatttggggagacgatgtggaggagttccgtccagagcgttttgaaaatccaagtgcgattccgcagcatgcgtttaaaccgtttggaaacggtcagcgtgcgtgtatcggtcagcagttcgctcttcatgaagcaacgctggtacttggtatgatgctaaaacactttgactttgaagatcatacaaactacgagctcgatattaaagaaactttaacgttaaaacctgaaggctttgtggtaaaagcaaaatcgaaaaaaattccgcttggcggtattccttcacctagcactgaacagtctgctaaaaaagtacgcaaaaaggcagaaaacgctcataatacgccgctgcttgtgctatacggttcaaatgcgggaacagctgaaggaacggcgcgtgatttagcagatattgcaatgagcaaaggatttgcaccgcaggtcgcaacgcttgattcacacgccggaaatcttccgcgcgaaggagctgtattaattgtaacggcgtcttataacggtcatccgcctgataacgcaaagcaatttgtcgactggttagaccaagcgtctgctgatgaagtaaaaggcgttcgctactccgtatttggatgcggcgataaaaactgggctgcgacgtatcaaaaagtgcctgcttttatcgatgaaacgcttgccgctaaaggggcagaaaacatcgctgaccgcggtgaagcagatgcaagcgacgactttgaaggcacatatgaagaatggcgtgatcatatgtggagtgacgtagcagcctactttaacctcgacattgaaaacagtgaagataataaatctactctttcacttcaatttgtcgacagcgccgcggatatgccgcttgcgaaaatgcacggtgcgttttcaacgaacgtcgtagcaagcaaagaacttcaacagccaggcagtgcacgaagcacgcgacatcttgaaattgaacttccaaaagaagcttcttatcaagaaggagatcatttaggtgttattcctcgcaactatgaaggaatagtaaaccgtgtaacagcaaggttcggcctaagcgcatcacagcaaatccgtctggaagcagaagaagaaaaattagctcatttgccactcgctaaaacagtatccgtactggagcttctgcaatacgtggagcttcaagatcctgttacgcgcacgcagcttcgcgcaatggctgctaaaacggtctgcccgccgcataaagtagagcttgaagccttgcttgaaaagcaagcctacaaagaacaagtgctggcaaaacgtttaacaatgcttgaactgcttgaaaaatacccggcgtgtgaaatgaaattcagcgaatttatcgcccttctgccaagcatacgcccgcgctattactcgatttcttcatcacctcgtgtcgatgaaaaacaagcaagcatcacggtcagcgttgtctcaggagaagcgtggagcggatatggagaatataaaggaattgcgtcgaactatcttgccgagctgcaagaaggagatacgattacgtgctttatttccacaccgcagtcagaatttacgctgccaaaagaccctgaaacgccgcttatcatggtcggaccgggaacaggcgtcgcgccgtttagaggctttgtgcaggcgcgcaaacagctaaaagaacaaggacagtcacttggagaagcacatttatacttcggctgccgttcacctcatgaagactatctgtatcaagaagagcttgaaaacgcccaaagcgaaggcatcattacgcttcataccgctttttctcgcatgccaaatcagccgaaaacatacgttcagcacgtaatggaacaagacggcaagaaattgattgaacttcttgatcaaggagcgcacttctatatttgcggagacggaagccaaatggcacctgccgttgaagcaacgcttatgaaaagctatgctgacgttcaccaagtgagtgaagcagacgctcgcttatggctgcagcagctagaagaaaaaggccgatacgcaaaagacgtgtgggctggg

SEQ ID NO: 68 - protein, 1049 aa, synthetic construct
  REGION 1..1049: note = Variant of cytochrome P450
MTIKEMPQPKTFGELKNLPLLNTDKPVQALMRIADELGEIFKFEAPGSVTRFLSSQRLIKEACDESRFDKNLSQALKFARDFLGDGLFTSWTHEPNWKKAHNILLPSFSQRAMKRYHAMMVDIAVQLVQKWERLNADEHIEVSEDMTRLTLDTIGLCGFNYRFNSFYRDQPHPFIVSMVRALDEVMNKLQRANPDDPAYDENKRQCQEDIKVMNDYVDKIIADRKARGEQSHDLLTQMLNGKDPETGEPLDDGNISYQIITFLIAGHETTSGLLSFALYFLVKNPHVLQKVAEEAARVLVDPVPSYKQVKQLKYVGMVLNEALRLWPTAPAFSLYAKEDTVLGGEYPLTKGDEVMVLIPQLHRDKTIWGDDVEEFRPERFENPSAIPQHAFKPFGNGQRACIGQQFALHEATLVLGMMLKHFDFEDHTNYELDIKETLTLKPEGFVVKAKSKKIPLGGIPSPSTEQSAKKVRKKAENAHNTPLLVLYGSNAGTAEGTARDLADIAMSKGFAPQVATLDSHAGNLPREGAVLIVTASYNGHPPDNAKQFVDWLDQASADEVKGVRYSVFGCGDKNWAATYQKVPAFIDETLAAKGAENIADRGEADASDDFEGTYEEWRDHMWSDVAAYFNLDIENSEDNKSTLSLQFVDSAADMPLAKMHGAFSTNVVASKELQQPGSARSTRHLEIELPKEASYQEGDHLGVIPRNYEGIVNRVTARFGLSASQQIRLEAEEEKLAHLPLAKTVSVLELLQYVELQDPVTRTQLRAMAAKTVCPPHKVELEALLEKQAYKEQVLAKRLTMLELLEKYPACEMKFSEFIALLPSIRPRYYSISSSPRVDEKQASITVSVVSGEAWSGYGEYKGIASNYLAELQEGDTITCFISTPQSEFTLPKDPETPLIMVGPGTGVAPFRGFVQARKQLKEQGQSLGEAHLYFGCRSPHEDYLYQEELENAQSEGIITLHTAFSRMPNQPKTYVQHVMEQDGKKLIELLDQGAHFYICGDGSQMAPAVEATLMKSYADVHQVSEADARLWLQQLEEKGRYAKDVWAG

SEQ ID NO: 69 - DNA, 3147 bp, synthetic construct
  misc_feature 1..3147: note = Variant of cytochrome P450
  source 1..3147: mol_type = other DNA
atgacaataaaggaaatgccgcagccgaaaacgtttggagaacttaaaaatttaccgttattaaacacagataaaccggttcaagctttgatgcgtattgcggatgaattaggagaaatctttaaattcgaggcgcctggtagcgtaacgcgctttttatcaagtcagcgtctaattaaagaagcatgcgatgaatcacgctttgataaaaacttaagtcaagcgcttaaatttgcacgtgattttcttggagacgggttatttacaagctggacgcatgaaccgaattggaaaaaagcgcataatatcttacttccaagctttagtcagcgtgcaatgaaacgttatcatgcgatgatggtcgatatcgccgtgcagcttgttcaaaagtgggagcgtctaaatgcagatgagcatattgaagtatcggaagacatgacacgtttaacgcttgatacaatgggtctttgcggctttaactatcgctttaacagcttttaccgagatcagcctcatccatttattgtgagtatggtccgtgcactggatgaagtaatgaacaagctgcagcgagcaaatccagacgacccagcttatgatgaaaacaagcgccagtgtcaagaagatatcaaggtgatgaacgactatgtagataaaattattgcagatcgcaaagcaaggggtgaacaaagccatgatttattaacgcagatgctaaacggaaaagatccagaaacgggtgagccgcttgatgacgggaacattagctatcaaattattacattcttaattgcgggacacgaaacaacaagtggtcttttatcatttgcgctgtatttcttagtgaaaaatccacatgtattacaaaaagtagcagaagaagcagcacgagttctagtagatcctgttccaagctacaaacaagtcaaacagcttaaatatgtcggcatggtcttaaacgaagcgctgcgcttatggccaactgctcctgcgttttccctatatgcaaaagaagatacggtgcttggaggagaatatcctttaaccaaaggcgacgaagtaatggttctgattcctcagcttcaccgtgataaaacaatttggggagacgatgtggaggagttccgtccagagcgttttgaaaatccaagtgcgattccgcagcatgcgtttaaaccgtttggaaacggtcagcgtgcgtgtatcggtcagcagttcgctcttcatgaagcaacgctggtacttggtatgatgctaaaacactttgactttgaagatcatacaaactacgagctcgatattaaagaaactttaacgttaaaacctgaaggctttgtggtaaaagcaaaatcgaaaaaaattccgcttggcggtattccttcacctagcactgaacagtctgctaaaaaagtacgcaaaaaggcagaaaacgctcataatacgccgctgcttgtgctatacggttcaaatgcgggaacagctgaaggaacggcgcgtgatttagcagatattgcaatgagcaaaggatttgcaccgcaggtcgcaacgcttgattcacacgccggaaatcttccgcgcgaaggagctgtattaattgtaacggcgtcttataacggtcatccgcctgataacgcaaagcaatttgtcgactggttagaccaagcgtctgctgatgaagtaaaaggcgttcgctactccgtatttggatgcggcgataaaaactgggctgcgacgtatcaaaaagtgcctgcttttatcgatgaaacgcttgccgctaaaggggcagaaaacatcgctgaccgcggtgaagcagatgcaagcgacgactttgaaggcacatatgaagaatggcgtgatcatatgtggagtgacgtagcagcctactttaacctcgacattgaaaacagtgaagataataaatctactctttcacttcaatttgtcgacagcgccgcggatatgccgcttgcgaaaatgcacggtgcgttttcaacgaacgtcgtagcaagcaaagaacttcaacagccaggcagtgcacgaagcacgcgacatcttgaaattgaacttccaaaagaagcttcttatcaagaaggagatcatttaggtgttattcctcgcaactatgaaggaatagtaaaccgtgtaacagcaaggttcggcctaagcgcatcacagcaaatccgtctggaagcagaagaagaaaaattagctcatttgccactcgctaaaacagtatccgtagaagagcttctgcaatacgtggagcttcaagatcctgttacgcgcacgcagcttcgcgcaatggctgctaaaacggtctgcccgccgcataaagtagagcttgaagccttgcttgaaaagcaagcctacaaagaacaagtgctggcaaaacgtttaacaatgcttgaactgcttgaaaaatacccggcgtgtgaaatgaaattcagcgaatttatcgcccttctgccaagcatacgcccgcgctattactcgatttcttcatcacctcgtgtcgatgaaaaacaagcaagcatcacggtcagcgttgtctcaggagaagcgtggagcggatatggagaatataaaggaattgcgtcgaactatcttgccgagctgcaagaaggagatacgattacgtgctttatttccacaccgcagtcagaatttacgctgccaaaagaccctgaaacgccgcttatcatggtcggaccgggaacaggcgtcgcgccgtttagaggctttgtgcaggcgcgcaaacagctaaaagaacaaggacagtcacttggagaagcacatttatacttcggctgccgttcacctcatgaagactatctgtatcaagaagagcttgaaaacgcccaaagcgaaggcatcattacgcttcataccgctttttctcgcatgccaaatcagccgaaaacatacgttcagcacgtaatggaacaagacggcaagaaattgattgaacttcttgatcaaggagcgcacttctatatttgcggagacggaagccaaatggcacctgccgttgaagcaacgcttatgaaaagctatgctgacgttcaccaagtgagtgaagcagacgctcgcttatggctgcagcagctagaagaaaaaggccgatacgcaaaagacgtgtgggctggg

SEQ ID NO: 70 - protein, 1049 aa, synthetic construct
  REGION 1..1049: note = Variant of cytochrome P450
MTIKEMPQPKTFGELKNLPLLNTDKPVQALMRIADELGEIFKFEAPGSVTRFLSSQRLIKEACDESRFDKNLSQALKFARDFLGDGLFTSWTHEPNWKKAHNILLPSFSQRAMKRYHAMMVDIAVQLVQKWERLNADEHIEVSEDMTRLTLDTMGLCGFNYRFNSFYRDQPHPFIVSMVRALDEVMNKLQRANPDDPAYDENKRQCQEDIKVMNDYVDKIIADRKARGEQSHDLLTQMLNGKDPETGEPLDDGNISYQIITFLIAGHETTSGLLSFALYFLVKNPHVLQKVAEEAARVLVDPVPSYKQVKQLKYVGMVLNEALRLWPTAPAFSLYAKEDTVLGGEYPLTKGDEVMVLIPQLHRDKTIWGDDVEEFRPERFENPSAIPQHAFKPFGNGQRACIGQQFALHEATLVLGMMLKHFDFEDHTNYELDIKETLTLKPEGFVVKAKSKKIPLGGIPSPSTEQSAKKVRKKAENAHNTPLLVLYGSNAGTAEGTARDLADIAMSKGFAPQVATLDSHAGNLPREGAVLIVTASYNGHPPDNAKQFVDWLDQASADEVKGVRYSVFGCGDKNWAATYQKVPAFIDETLAAKGAENIADRGEADASDDFEGTYEEWRDHMWSDVAAYFNLDIENSEDNKSTLSLQFVDSAADMPLAKMHGAFSTNVVASKELQQPGSARSTRHLEIELPKEASYQEGDHLGVIPRNYEGIVNRVTARFGLSASQQIRLEAEEEKLAHLPLAKTVSVEELLQYVELQDPVTRTQLRAMAAKTVCPPHKVELEALLEKQAYKEQVLAKRLTMLELLEKYPACEMKFSEFIALLPSIRPRYYSISSSPRVDEKQASITVSVVSGEAWSGYGEYKGIASNYLAELQEGDTITCFISTPQSEFTLPKDPETPLIMVGPGTGVAPFRGFVQARKQLKEQGQSLGEAHLYFGCRSPHEDYLYQEELENAQSEGIITLHTAFSRMPNQPKTYVQHVMEQDGKKLIELLDQGAHFYICGDGSQMAPAVEATLMKSYADVHQVSEADARLWLQQLEEKGRYAKDVWAG

SEQ ID NO: 71 - DNA, 3147 bp, synthetic construct
  misc_feature 1..3147: note = Variant of cytochrome P450
  source 1..3147: mol_type = other DNA
atgacaataaaggaaatgccgcagccgaaaacgtttggagaacttaaaaatttaccgttattaaacacagataaaccggttcaagctttgatgcgtattgcggatgaattaggagaaatctttaaattcgaggcgcctggtagcgtaacgcgctttttatcaagtcagcgtctaattaaagaagcatgcgatgaatcacgctttgataaaaacttaagtcaagcgcttaaatttgcacgtgattttcttggagacgggttatttacaagctggacgcatgaaccgaattggaaaaaagcgcataatatcttacttccaagctttagtcagcgtgcaatgaaacgttatcatgcgatgatggtcgatatcgccgtgcagcttgttcaaaagtgggagcgtctaaatgcagatgagcatattgaagtatcggaagacatgacacgtttaacgcttgatacaattggtctttgcggctttaactatcgctttaacagcttttaccgagatcagcctcatccatttattgtgagtatggtccgtgcagttgatgaagtaatgaacaagctgcagcgagcaaatccagacgacccagcttatgatgaaaacaagcgccagtgtcaagaagatatcaaggtgatgaacgactatgtagataaaattattgcagatcgcaaagcaaggggtgaacaaagccatgatttattaacgcagatgctaaacggaaaagatccagaaacgggtgagccgcttgatgacgggaacattagctatcaaattattacattcttaattgcgggacacgaaacaacaagtggtcttttatcatttgcgctgtatttcttagtgaaaaatccacatgtattacaaaaagtagcagaagaagcagcacgagttctagtagatcctgttccaagctacaaacaagtcaaacagcttaaatatgtcggcatggtcttaaacgaagcgctgcgcttatggccaactgctcctgcgttttccctatatgcaaaagaagatacggtgcttggaggagaatatcctttaaccaaaggcgacgaagtaatggttctgattcctcagcttcaccgtgataaaacaatttggggagacgatgtggaggagttccgtccagagcgttttgaaaatccaagtgcgattccgcagcatgcgtttaaaccgtttggaaacggtcagcgtgcgtgtatcggtcagcagttcgctcttcatgaagcaacgctggtacttggtatgatgctaaaacactttgactttgaagatcatacaaactacgagctcgatattaaagaaactttaacgttaaaacctgaaggctttgtggtaaaagcaaaatcgaaaaaaattccgcttggcggtattccttcacctagcactgaacagtctgctaaaaaagtacgcaaaaaggcagaaaacgctcataatacgccgctgcttgtgctatacggttcaaatgcgggaacagctgaaggaacggcgcgtgatttagcagatattgcaatgagcaaaggatttgcaccgcaggtcgcaacgcttgattcacacgccggaaatcttccgcgcgaaggagctgtattaattgtaacggcgtcttataacggtcatccgcctgataacgcaaagcaatttgtcgactggttagaccaagcgtctgctgatgaagtaaaaggcgttcgctactccgtatttggatgcggcgatagaaactgggctgcgacgtatcaaaaagtgcctgcttttatcgatgaaacgcttgccgctaaaggggcagaaaacatcgctgaccgcggtgaagcagatgcaagcgacgactttgaaggcacatatgaagaatggcgtgatcatatgtggagtgacgtagcagcctactttaacctcgacattgaaaacagtgaagataataaatctactctttcacttcaatttgtcgacagcgccgcggatatgccgcttgcgaaaatgcacggtgcgttttcaacgaacgtcgtagcaagcaaagaacttcaacagccaggcagtgcacgaagcacgcgacatcttgaaattgaacttccaaaagaagcttcttatcaagaaggagatcatttaggtgttattcctcgcaactatgaaggaatagtaaaccgtgtaacagcaaggttcggcctaagcgcatcacagcaaatccgtctggaagcagaagaagaaaaattagctcatttgccactcgctaaaacagtatccgtagaagagcttctgcaatacgtggagcttcaagatcctgttacgcgcacgcagcttcgcgcaatggctgctaaaacggtctgcccgccgcataaagtagagcttgaagccttgcttgaaaagcaagcctacaaagaacaagtgctggcaaaacgtttaacaatgcttgaactgcttgaaaaatacccggcgtgtgaaatgaaattcagcgaatttatcgcccttctgccaagcatacgcccgcgctattactcgatttcttcatcacctcgtgtcgatgaaaaacaagcaagcatcacggtcagcgttgtctcaggagaagcgtggagcggatatggagaatataaaggaattgcgtcgaactatcttgccgagctgcaagaaggagatacgattacgtgctttatttccacaccgcagtcagaatttacgctgccaaaagaccctgaaacgccgcttatcatggtcggaccgggaacaggcgtcgcgccgtttagaggctttgtgcaggcgcgcaaacagctaaaagaacaaggacagtcacttggagaagcacatttatacttcggctgccgttcacctcatgaagactatctgtatcaagaagagcttgaaaacgcccaaagcgaaggcatcattacgcttcataccgctttttctcgcatgccaaatcagccgaaaacatacgttcagcacgtaatggaacaagacggcaagaaattgattgaacttcttgatcaaggagcgcacttctatatttgcggagacggaagccaaatggcacctgccgttgaagcaacgcttatgaaaagctatgctgacgttcaccaagtgagtgaagcagacgctcgcttatggctgcagcagctagaagaaaaaggccgatacgcaaaagacgtgtgggctggg

SEQ ID NO: 72 - protein, 1049 aa, synthetic construct
  REGION 1..1049: note = Variant of cytochrome P450
MTIKEMPQPKTFGELKNLPLLNTDKPVQALMRIADELGEIFKFEAPGSVTRFLSSQRLIKEACDESRFDKNLSQALKFARDFLGDGLFTSWTHEPNWKKAHNILLPSFSQRAMKRYHAMMVDIAVQLVQKWERLNADEHIEVSEDMTRLTLDTIGLCGFNYRFNSFYRDQPHPFIVSMVRAVDEVMNKLQRANPDDPAYDENKRQCQEDIKVMNDYVDKIIADRKARGEQSHDLLTQMLNGKDPETGEPLDDGNISYQIITFLIAGHETTSGLLSFALYFLVKNPHVLQKVAEEAARVLVDPVPSYKQVKQLKYVGMVLNEALRLWPTAPAFSLYAKEDTVLGGEYPLTKGDEVMVLIPQLHRDKTIWGDDVEEFRPERFENPSAIPQHAFKPFGNGQRACIGQQFALHEATLVLGMMLKHFDFEDHTNYELDIKETLTLKPEGFVVKAKSKKIPLGGIPSPSTEQSAKKVRKKAENAHNTPLLVLYGSNAGTAEGTARDLADIAMSKGFAPQVATLDSHAGNLPREGAVLIVTASYNGHPPDNAKQFVDWLDQASADEVKGVRYSVFGCGDRNWAATYQKVPAFIDETLAAKGAENIADRGEADASDDFEGTYEEWRDHMWSDVAAYFNLDIENSEDNKSTLSLQFVDSAADMPLAKMHGAFSTNVVASKELQQPGSARSTRHLEIELPKEASYQEGDHLGVIPRNYEGIVNRVTARFGLSASQQIRLEAEEEKLAHLPLAKTVSVEELLQYVELQDPVTRTQLRAMAAKTVCPPHKVELEALLEKQAYKEQVLAKRLTMLELLEKYPACEMKFSEFIALLPSIRPRYYSISSSPRVDEKQASITVSVVSGEAWSGYGEYKGIASNYLAELQEGDTITCFISTPQSEFTLPKDPETPLIMVGPGTGVAPFRGFVQARKQLKEQGQSLGEAHLYFGCRSPHEDYLYQEELENAQSEGIITLHTAFSRMPNQPKTYVQHVMEQDGKKLIELLDQGAHFYICGDGSQMAPAVEATLMKSYADVHQVSEADARLWLQQLEEKGRYAKDVWAG

SEQ ID NO: 73 - DNA, 3147 bp, synthetic construct
  misc_feature 1..3147: note = Variant of cytochrome P450
  source 1..3147: mol_type = other DNA
atgacaataaaggaaatgccgcagccgaaaacgtttggagaacttaaaaatttaccgttattaaacacagataaaccggttcaagctttgatgcgtattgcggatgaattaggagaaatctttaaattcgaggcgcctggtagcgtaacgcgctttttatcaagtcagcgtctaattaaagaagcatgcgatgaatcacgctttgataaaaacttaagtcaagcgcttaaatttgcacgtgattttcttggagacgggttatttacaagctggacgcatgaaccgaattggaaaaaagcgcataatatcttacttccaagctttagtcagcgtgcaatgaaacgttatcatgcgatgatggtcgatatcgccgtgcagcttgttcaaaagtgggagcgtctaaatgcagatgagcatattgaagtatcggaagacatgggtcgtttaacgcttgatacaattggtctttgcggctttaactatcgctttaacagcttttaccgagatcagcctcatccatttattgtgagtatggtccgtgcactggatgaagtaatgaacaagctgcagcgagcaaatccagacgacccagcttatgatgaaaacaagcgccagtgtcaagaagatatcaaggtgatgaacgactatgtagataaaattattgcagatcgcaaagcaaggggtgaacaaagccatgatttattaacgcagatgctaaacggaaaagatccagaaacgggtgagccgcttgatgacgggaacattagctatcaaattattacattcttaattgcgggacacgaaacaacaagtggtcttttatcatttgcgctgtatttcttagtgaaaaatccacatgtattacaaaaagtagcagaagaagcagcacgagttctagtagatcctgttccaagctacaaacaagtcaaacagcttaaatatgtcggcatggtcttaaacgaagcgctgcgcttatggccaactgctcctgcgttttccctatatgcaaaagaagatacggtgcttggaggagaatatcctttaaccaaaggcgacgaagtaatggttctgattcctcagcttcaccgtgataaaacaatttggggagacgatgtggaggagttccgtccagagcgttttgaaaatccaagtgcgattccgcagcatgcgtttaaaccgtttggaaacggtcagcgtgcgtgtatcggtcagcagttcgctcttcatgaagcaacgctggtacttggtatgatgctaaaacactttgactttgaagatcatacaaactacgagctcgatattaaagaaactttaacgttaaaacctgaaggctttgtggtaaaagcaaaatcgaaaaaaattccgcttggcggtattccttcacctagcactgaacagtctgctaaaaaagtacgcaaaaaggcagaaaacgctcataatacgccgctgcttgtgctatacggttcaaatgcgggaacagctgaaggaacggcgcgtgatttagcagatattgcaatgagcaaaggatttgcaccgcaggtcgcaacgcttgattcacacgccggaaatcttccgcgcgaaggagctgtattaattgtaacggcgtcttataacggtcatccgcctgataacgcaaagcaatttgtcgactggttagaccaagcgtctgctgatgaagtaaaaggcgttcgctactccgtatttggatgcggcgataaaaactgggctgcgacgtatcaaaaagtgcctgcttttatcgatgaaacgcttgccgctaaaggggcagaaaacatcgctgaccgcggtgaagcagatgcaagcgacgactttgaaggcacatatgaagaatggcgtgatcatatgtggagtgacgtagcagcctactttaacctcgacattgaaaacagtgaagataataaatctactctttcacttcaatttgtcgacagcgccgcggatatgccgcttgcgaaaatgcacggtgcgttttcaacgaacgtcgtagcaagcaaagaacttcaacagccaggcagtgcacgaagcacgcgacatcttgaaattgaacttccaaaagaagcttcttatcaagaaggagatcatttaggtgttattcctcgcaactatgaaggaatagtaaaccgtgtaacagcaaggttcggcctaagcgcatcacagcaaatccgtctggaagcagaagaagaaaaattagctcatttgccactcgctaaaacagtatccgtagaagagcttctgcaatacgtggagcttcaagatcctgttacgcgcacgcagcttcgcgcaatggctgctaaaacggtctgcccgccgcataaagtagagcttgaagccttgcttgaaaagcaagcctacaaagaacaagtgctggcaaaacgtttaacaatgcttgaactgcttgaaaaatacccggcgtgtgaaatgaaattcagcgaatttatcgcccttctgccaagcatacgcccgcgctattactcgatttcttcatcacctcgtgtcgatgaaaaacaagcaagcatcacggtcagcgttgtctcaggagaagcgtggagcggatatggagaatataaaggaattgcgtcgaactatcttgccgagctgcaagaaggagatacgattacgtgctttatttccacaccgcagtcagaatttacgctgccaaaagaccctgaaacgccgcttatcatggtcggaccgggaacaggcgtcgcgccgtttagaggctttgtgcaggcgcgcaaacagctaaaagaacaaggacagtcacttggagaagcacatttatacttcggctgccgttcacctcatgaagactatctgtatcaagaagagcttgaaaacgcccaaagcgaaggcatcattacgcttcataccgctttttctcgcatgccaaatcagccgaaaacatacgttcagcacgtaatggaacaagacggcaagaaattgattgaacttcttgatcaaggagcgcacttctatatttgcggagacggaagccaaatggcacctgccgttgaagcaacgcttatgaaaagctatgctgacgttcaccaagtgagtgaagcagacgctcgcttatggctgcagcagctagaagaaaaaggccgatacgcaaaagacgtgtgggctggg

SEQ ID NO: 74 - protein, 1049 aa, synthetic construct
  REGION 1..1049: note = Variant of cytochrome P450
MTIKEMPQPKTFGELKNLPLLNTDKPVQALMRIADELGEIFKFEAPGSVTRFLSSQRLIKEACDESRFDKNLSQALKFARDFLGDGLFTSWTHEPNWKKAHNILLPSFSQRAMKRYHAMMVDIAVQLVQKWERLNADEHIEVSEDMGRLTLDTIGLCGFNYRFNSFYRDQPHPFIVSMVRALDEVMNKLQRANPDDPAYDENKRQCQEDIKVMNDYVDKIIADRKARGEQSHDLLTQMLNGKDPETGEPLDDGNISYQIITFLIAGHETTSGLLSFALYFLVKNPHVLQKVAEEAARVLVDPVPSYKQVKQLKYVGMVLNEALRLWPTAPAFSLYAKEDTVLGGEYPLTKGDEVMVLIPQLHRDKTIWGDDVEEFRPERFENPSAIPQHAFKPFGNGQRACIGQQFALHEATLVLGMMLKHFDFEDHTNYELDIKETLTLKPEGFVVKAKSKKIPLGGIPSPSTEQSAKKVRKKAENAHNTPLLVLYGSNAGTAEGTARDLADIAMSKGFAPQVATLDSHAGNLPREGAVLIVTASYNGHPPDNAKQFVDWLDQASADEVKGVRYSVFGCGDKNWAATYQKVPAFIDETLAAKGAENIADRGEADASDDFEGTYEEWRDHMWSDVAAYFNLDIENSEDNKSTLSLQFVDSAADMPLAKMHGAFSTNVVASKELQQPGSARSTRHLEIELPKEASYQEGDHLGVIPRNYEGIVNRVTARFGLSASQQIRLEAEEEKLAHLPLAKTVSVEELLQYVELQDPVTRTQLRAMAAKTVCPPHKVELEALLEKQAYKEQVLAKRLTMLELLEKYPACEMKFSEFIALLPSIRPRYYSISSSPRVDEKQASITVSVVSGEAWSGYGEYKGIASNYLAELQEGDTITCFISTPQSEFTLPKDPETPLIMVGPGTGVAPFRGFVQARKQLKEQGQSLGEAHLYFGCRSPHEDYLYQEELENAQSEGIITLHTAFSRMPNQPKTYVQHVMEQDGKKLIELLDQGAHFYICGDGSQMAPAVEATLMKSYADVHQVSEADARLWLQQLEEKGRYAKDVWAG

SEQ ID NO: 75 - DNA, 3147 bp, synthetic construct
  misc_feature 1..3147: note = Variant of cytochrome P450
  source 1..3147: mol_type = other DNA
atgacaataaaggaaatgccgcagccgaaaacgtttggagaacttaaaaatttaccgttattaaacacagataaaccggttcaagctttgatgcgtattgcggatgaattaggagaaatctttaaattcgaggcgcctggtagcgtaacgcgctttttatcaagtcagcgtctaattaaagaagcatgcgatgaatcacgctttgataaaaacttaagtcaagcgcttaaatttgcacgtgattttcttggagacgggttatttacaagctggacgcatgaaccgaattggaaaaaagcgcataatatcttacttccaagctttagtcagcgtgcaatgaaacgttatcatgcgatgatggtcgatatcgccgtgcagcttgttcaaaagtgggagcgtctaaatgcagatgagcatattgaagtatcggaagacatgacacgtttaacgcttgatacaattggtctttgcggctttaactatcgctttaacagcttttaccgagatcagcctcatccatttattgtgagtatggtccgtgcactggatgaagtaatgaacaagctgcagcgagcaaatccagacgacccagcttatgatgaaaacaagcgccagtgtcaagaagatatcaaggtgatgaacgactatgtagataaaattattgcagatcgcaaagcaaggggtgaacaaagccatgatttattaacgcagatgctaaacggaaaagatccagaaacgggtgagccgcttgatgacgggaacattagttatcaaattattacattcttaattgcgggacacgaaacaacaagtggtcttttatcatttgcgctgtatttcttagtgaaaaatccacatgtattacaaaaagtagcagaagaagcagcacgagttctagtagatcctgttccaagctacaaacaagtcaaacagcttaaatatgtcggcatggtcttaaacgaagcgctgcgcttatggccaactgctcctgcgttttccctatatgcaaaagaagatacggtgcttggaggagaatatcctttaaccaaaggcgacgaagtaatggttctgattcctcagcttcaccgtgataaaacaatttggggagacgatgtggaggagttccgtccagagcgttttgaaaatccaagtgcgattccgcagcatgcgtttaaaccgtttggaaacggtcagcgtgcgtgtatcggtcagcagttcgctcttcatgaagcaacgctggtacttggtatgatgctaaaacactttgactttgaagatcatacaaactacgagctcgatattaaagaaactttaacgttaaaacctgaaggctttgtggtaaaagcaaaatcgaaaggcattccgcttggcggtattccttcacctagcactgaacagtctgctaaaaaagtacgcaaaaaggcagaaaacgctcataatacgccgctgcttgtgctatacggttcaaatgcgggaacagctgaaggaacggcgcgtgatttagcagatattgcaatgagcaaaggatttgcaccgcaggtcgcaacgcttgattcacacgccggaaatcttccgcgcgaaggagctgtattaattgtaacggcgtcttataacggtcatccgcctgataacgcaaagcaatttgtcgactggttagaccaagcgtctgctgatgaagtaaaaggcgttcgctactccgtatttggatgcggcgataaaaactgggctgcgacgtatcaaaaagtgcctgcttttatcgatgaaacgcttgccgctaaaggggcagaaaacatcgctgaccgcggtgaagcagatgcaagcgacgattttgaaggcacatatgaagaatggcgtgatcatatgtggagcgacgtagcagcctactttaacctcgacattgaaaacagtgaagataataaatctactctttcacttcaatttgtcgacagcgccgcggatatgccgcttgcgaaaatgcacggtgcgttttcaacgaacgtcgtagcaagcaaagaacttcaacagccaggcagtgcacgaagcacgcgacatcttgaaattgaacttccaaaagaagcttcttatcaagaaggagatcatttaggtgttattcctcgcaactatgaaggaatagtaaaccgtgtaacagcaaggttcggcctaagcgcatcacagcaaatccgttgcgaagcagaagaagaaaaattagctcatttgccactcgctaaaacagtatccgtagaggagcttctgcaatacgtggagcttcaagatcctgttacgcgcacgcagcttcgcgcaatggctgctaaaacggtctgcccgccgcataaagtagagcttgaagccttgcttgaaaagcaagcctacaaagaacaagtgctggcaaaacgtttaacaatgcttgaactgcttgaaaaatacccggcgtgtgaaatgaaattcagcgaatttatcgcccttctgccaagcatacgcccgcgctattactcgatttcttcatcacctcgtgtcgatgaaaaacaagcaagcatcacggtcagcgttgtctcaggagaagcgtggagcggatatggagaatataaaggaattgcgtcgaactatcttgccgagctgcaagaaggagatacgattacgtgctttatttccacaccgcagtcagaatttacgctgccaaaagaccctgaaacgccgcttatcatggtcggaccgggaacaggcgtcgcgccgtttagaggctttgtgcaggcgcgcaaacagctaaaagaacaaggacagtcacttggagaagcacatttatacttcggctgccgttcacctcatgaagactatctgtatcaagaagagcttgaaaacgcccaaagcgaaggcatcattacgcttcataccgctttttctcgcatgccaaatcagccgaaaacatacgttcagcacgtaatggaacaagacggcaagaaattgattgaacttcttgatcaaggagcgcacttctatatttgcggagacggaagccaaatggcacctgccgttgaagcaacgcttatgaaaagctatgctgacgttcaccaagtgagtgaagcagacgctcgcttatggctgcagcagctagaagaaaaaggccgatacgcaaaagacgtgtgggctggg

SEQ ID NO: 76 - protein, 1049 aa, synthetic construct
  REGION 1..1049: note = Variant of cytochrome P450
MTIKEMPQPKTFGELKNLPLLNTDKPVQALMRIADELGEIFKFEAPGSVTRFLSSQRLIKEACDESRFDKNLSQALKFARDFLGDGLFTSWTHEPNWKKAHNILLPSFSQRAMKRYHAMMVDIAVQLVQKWERLNADEHIEVSEDMTRLTLDTIGLCGFNYRFNSFYRDQPHPFIVSMVRALDEVMNKLQRANPDDPAYDENKRQCQEDIKVMNDYVDKIIADRKARGEQSHDLLTQMLNGKDPETGEPLDDGNISYQIITFLIAGHETTSGLLSFALYFLVKNPHVLQKVAEEAARVLVDPVPSYKQVKQLKYVGMVLNEALRLWPTAPAFSLYAKEDTVLGGEYPLTKGDEVMVLIPQLHRDKTIWGDDVEEFRPERFENPSAIPQHAFKPFGNGQRACIGQQFALHEATLVLGMMLKHFDFEDHTNYELDIKETLTLKPEGFVVKAKSKGIPLGGIPSPSTEQSAKKVRKKAENAHNTPLLVLYGSNAGTAEGTARDLADIAMSKGFAPQVATLDSHAGNLPREGAVLIVTASYNGHPPDNAKQFVDWLDQASADEVKGVRYSVFGCGDKNWAATYQKVPAFIDETLAAKGAENIADRGEADASDDFEGTYEEWRDHMWSDVAAYFNLDIENSEDNKSTLSLQFVDSAADMPLAKMHGAFSTNVVASKELQQPGSARSTRHLEIELPKEASYQEGDHLGVIPRNYEGIVNRVTARFGLSASQQIRCEAEEEKLAHLPLAKTVSVEELLQYVELQDPVTRTQLRAMAAKTVCPPHKVELEALLEKQAYKEQVLAKRLTMLELLEKYPACEMKFSEFIALLPSIRPRYYSISSSPRVDEKQASITVSVVSGEAWSGYGEYKGIASNYLAELQEGDTITCFISTPQSEFTLPKDPETPLIMVGPGTGVAPFRGFVQARKQLKEQGQSLGEAHLYFGCRSPHEDYLYQEELENAQSEGIITLHTAFSRMPNQPKTYVQHVMEQDGKKLIELLDQGAHFYICGDGSQMAPAVEATLMKSYADVHQVSEADARLWLQQLEEKGRYAKDVWAG

SEQ ID NO: 77 - DNA, 3147 bp, synthetic construct
  misc_feature 1..3147: note = Variant of cytochrome P450
  source 1..3147: mol_type = other DNA
atgacaataaaggaaatgccgcagccgaaaacgtttggagaacttaaaaatttaccgttattaaacacagataaaccggttcaagctttgatgcgtattgcggatgaattaggagaaatctttaaattcgaggcgcctggtagcgtaacgcgctttttatcaagtcagcgtctaattaaagaagcatgcgatgaatcacgctttgataaaaacttaagtcaagcgcttaaagtggcacgtgattttcttggagacgggttatttacaagctggacgcatgaaccgaattggaaaaaagcgcataatatcttacttccaagctttagtcagcgtgcaatgaaacgttatcatgcgatgatggtcgatatcgccgtgcagcttgttcaaaagtgggagcgtctaaatgcagatgagcatattgaagtatcggaagacatgacacgtttaacgcttgatacaattggtctttgcggctttaactatcgctttaacagcttttaccgagatcagcctcatccatttattgtgagtatggtccgtgcactggatgaagtaatgaacaagctgcagcgagcaaatccagacgacccagcttatgatgaaaacaagcgccagtgtcaagaagatatcaaggtgatgaacgactatgtagataaaattattgcagatcgcaaagcaaggggtgaacaaagccatgatttattaacgcagatgctaaacggaaaagatccagaaacgggtgagccgcttgatgacgggaacattagctatcaaattattacattcttaattgcgggacacgaaacaacaagtggtcttttatcatttgcgctgtatttcttagtgaaaaatccacatgtattacaaaaagtagcagaagaagcagcacgagttctagtagatcctgttccaagctacaaacaagtcaaacagcttaaatatgtcggcatggtcttaaacgaagcgctgcgcttatggccaactgctcctgcgttttccctatatgcaaaagaagatacggtgcttggaggagaatatcctttaaccaaaggcgacgaagtaatggttctgattcctcagcttcaccgtgataaaacaatttggggagacgatgtggaggagttccgtccagagcgttttgaaaatccaagtgcgattccgcagcatgcgtttaaaccgtttggaaacggtcagcgtgcgtgtatcggtcagcagttcgctcttcatgaagcaacgctggtacttggtatgatgctaaaacactttgactttgaagatcatacaaactacgagctcgatattaaagaaactttaacgttaaaacctgaaggctttgtggtaaaagcaaaatcgaaaaaaattccgcttggcggtattccttcacctagcactgaacagtctgctaaaaaagtacgcaaaaaggcagaaaacgctcataatacgccgctgcttgtgctatacggttcaaatgcgggaacagctgaaggaacggcgcgtgatttagcagatattgcaatgagcaaaggatttgcaccgcaggtcgcaacgcttgattcacacgccggaaatcttccgcgcgaaggagctgtattaattgtaacggcgtcttataacggtcatccgcctgataacgcaaagcaatttgtcgactggttagaccaagcgtctgctgatgaagtaaaaggcgttcgctactccgtatttggatgcggcgataaaaactgggctgcgacgtatcaaaaagtgcctgcttttatcgatgaaacgcttgccgctaaaggggcagaaaacatcgctgaccgcggtgaagcagatgcaagcgacgactttgaaggcacatatgaagaatggcgtgatcatatgtggagtgacgtagcagcctactttaacctcgacattgaaaacagtgaagataataaatctactctttcacttcaatttgtcgacagcgccgcggatatgccgcttgcgaaaatgcacggtgcgttttcaacgaacgtcgtagcaagcaaagaacttcaacagccaggcagtgcacgaagcacgcgacatcttgaaattgaacttccaaaagaagcttcttatcaagaaggagatcatttaggtgttattcctcgcaactatgaaggaatagtaaaccgtgtaacagcaaggttcggcctaagcgcatcacagcaaatccgtctggaagcagaagaagaaaaattagctcatttgccactcgctaaaacagtatccgtagaagagcttctgcaatacgtggagcttcaagatcctgttacgcgcacgcagcttcgcgcaatggctgctaaaacggtctgcccgccgcataaagtagagcttgaagccttgcttgaaaagcaagcctacaaagaacaagtgctggcaaaacgtttaacaatgcttgaactgcttgaaaaatacccggcgtgtgaaatgaaattcagcgaatttatcgcccttctgccaagcatacgcccgcgctattactcgatttcttcatcacctcgtgtcgatgaaaaacaagcaagcatcacggtcagcgttgtctcaggagaagcgtggagcggatatggagaatataaaggaattgcgtcgaactatcttgccgagctgcaagaaggagatacgattacgtgctttatttccacaccgcagtcagaatttacgctgccaaaagaccctgaaacgccgcttatcatggtcggaccgggaacaggcgtcgcgccgtttagaggctttgtgcaggcgcgcaaacagctaaaagaacaaggacagtcacttggagaagcacatttatacttcggctgccgttcacctcatgaagactatctgtatcaagaagagcttgaaaacgcccaaagcgaaggcatcattacgcttcataccgctttttctcgcatgccaaatcagccgaaaacatacgttcagcacgtaatggaacaagacggcaagaaattgattgaacttcttgatcaaggagcgcacttctatatttgcggagacggaagccaaatggcacctgccgttgaagcaacgcttatgaaaagctatgctgacgttcaccaagtgagtgaagcagacgctcgcttatggctgcagcagctagaagaaaaaggccgatacgcaaaagacgtgtgggctggg

SEQ ID NO: 78 - protein, 1049 aa, synthetic construct
  REGION 1..1049: note = Variant of cytochrome P450
MTIKEMPQPKTFGELKNLPLLNTDKPVQALMRIADELGEIFKFEAPGSVTRFLSSQRLIKEACDESRFDKNLSQALKVARDFLGDGLFTSWTHEPNWKKAHNILLPSFSQRAMKRYHAMMVDIAVQLVQKWERLNADEHIEVSEDMTRLTLDTIGLCGFNYRFNSFYRDQPHPFIVSMVRALDEVMNKLQRANPDDPAYDENKRQCQEDIKVMNDYVDKIIADRKARGEQSHDLLTQMLNGKDPETGEPLDDGNISYQIITFLIAGHETTSGLLSFALYFLVKNPHVLQKVAEEAARVLVDPVPSYKQVKQLKYVGMVLNEALRLWPTAPAFSLYAKEDTVLGGEYPLTKGDEVMVLIPQLHRDKTIWGDDVEEFRPERFENPSAIPQHAFKPFGNGQRACIGQQFALHEATLVLGMMLKHFDFEDHTNYELDIKETLTLKPEGFVVKAKSKKIPLGGIPSPSTEQSAKKVRKKAENAHNTPLLVLYGSNAGTAEGTARDLADIAMSKGFAPQVATLDSHAGNLPREGAVLIVTASYNGHPPDNAKQFVDWLDQASADEVKGVRYSVFGCGDKNWAATYQKVPAFIDETLAAKGAENIADRGEADASDDFEGTYEEWRDHMWSDVAAYFNLDIENSEDNKSTLSLQFVDSAADMPLAKMHGAFSTNVVASKELQQPGSARSTRHLEIELPKEASYQEGDHLGVIPRNYEGIVNRVTARFGLSASQQIRLEAEEEKLAHLPLAKTVSVEELLQYVELQDPVTRTQLRAMAAKTVCPPHKVELEALLEKQAYKEQVLAKRLTMLELLEKYPACEMKFSEFIALLPSIRPRYYSISSSPRVDEKQASITVSVVSGEAWSGYGEYKGIASNYLAELQEGDTITCFISTPQSEFTLPKDPETPLIMVGPGTGVAPFRGFVQARKQLKEQGQSLGEAHLYFGCRSPHEDYLYQEELENAQSEGIITLHTAFSRMPNQPKTYVQHVMEQDGKKLIELLDQGAHFYICGDGSQMAPAVEATLMKSYADVHQVSEADARLWLQQLEEKGRYAKDVWAG

SEQ ID NO: 79 - DNA, 3147 bp, synthetic construct
  misc_feature 1..3147: note = Variant of cytochrome P450
  source 1..3147: mol_type = other DNA
atgacaataaaggaaatgccgcagccgaaaacgtttggagaacttaaaaatttaccgttattaaacacagataaaccggttcaagctttgatgcgtattgcggatgaattaggagaaatctttaaattcgaggcgcctggtagcgtaacgcgctttttatcaagtcagcgtctaattaaagaagcatgcgatgaatcacgctttgataaaaacttaagtcaagcgcttaaatttgcacgtgattttcttggagacgggttatttacaagctggacgcatgaaccgaattggaaaaaagcgcataatatcttactgccaagctttagtcagcgtgcaatgaaacgttatcatgcgatgatggtcgatatcgccgtgcagcttgttcaaaagtgggagcgtctaaatgcagatgagcatattgaagtatcggaagacatgacacgtttaacgcttgatacaattggtctttgcggctttaactatcgctttaacagcttttaccgagatcagcctcatccatttattgtgagtatggtccgtgcactggatgaagtaatgaacaagctgcagcgagcaaatccagacgacccagcttatgatgaaaacaagcgccagtgtcaagaagatatcaaggtgatgaacgactatgtagataaaattattgcagatcgcaaagcaaggggtgaacaaagccatgatttattaacgcagatgctaaacggaaaagatccagaaacgggtgagccgcttgatgacgggaacattagctatcaaattattacattcttaattgcgggacacgaaacaacaagtggtcttttatcatttgcgctgtatttcttagtgaaaaatccacatgtattacaaaaagtagcagaagaagcagcacgagttctagtagatcctgttccaagctacaaacaagtcaaacagcttaaatatgtcggcatggtcttaaacgaagcgctgcgcttatggccaactgctcctgcgttttccctatatgcaaaagaagatacggtgcttggaggagaatatcctttaaccaaaggcgacgaagtaatggttctgattcctcagcttcaccgtgataaaacaatttggggagacgatgtggaggagttccgtccagagcgttttgaaaatccaagtgcgattccgcagcatgcgtttaaaccgtttggaaacggtcagcgtgcgtgtatcggtcagcagttcgctcttcatgaagcaacgctggtacttggtatgatgctaaaacactttgactttgaagatcatacaaactacgagctcgatattaaagaaactttaacgttaaaacctgaaggctttgtggtaaaagcaaaatcgaaaaaaattccgcttggcggtattccttcacctagcactgaacagtctgctaaaaaagtacgcaaaaaggcagaaaacgctcataatacgccgctgcttgtgctatacggttcaaatgcgggaacagctgaaggaacggcgcgtgatttagcagatattgcaatgagcaaaggatttgcaccgcaggtcgcaacgcttgattcacacgccggaaatcttccgcgcgaaggagctgtattaattgtaacggcgtcttataacggtcatccgcctgataacgcaaagcaatttgtcgactggttagaccaagcgtctgctgatgaagtaaacggcgttcgctactccgtatttggatgcggcgataaaacctgggctgcgacgtatcaaaaagtgcctgcttttatcgatgaaacgcttgccgctaaaggggcagaaaacatcgctgaccgcggtgaagcagatgcaagcgacgactttgaaggcacatatgaagaatggcgtgatcatatgtggagtgacgtagcagcctactttaacctcgacattgaaaacagtgaagataataaatctactctttcacttcaatttgtcgacagcgccgcggatatgccgcttgcgaaaatgcacggtgcgctgtcaacgaacgtcgtagcaagcaaagaacttcaacagccaggcagtgcacgaagcacgcgacatcttgaaattgaacttccaaaagaagcttcttatcaagaaggagatcatttaggtgttattcctcgcaactatgaaggaatagtaaaccgtgtaacagcaaggttcggcctaagcgcatcacagcaaatccgtctggaagcagaagaagaaaaattagctcatttgccactcgctaaaacagtatccgtagaagagcttctgcaatacgtggagcttcaagatcctgttacgcgcacgcagcttcgcgcaatggctgctaaaacggtctgcccgccgcataaagtagagcttgaagccttgcttgaaaagcaagcctacaaagaacaagtgctggcaaaacgtttaacaatgcttgaactgcttgaaaaatacccggcgtgtgaaatgaaattcagcgaatttatcgcccttctgccaagcatacgcccgcgctattactcgatttcttcatcacctcgtgtcgatgaaaaacaagcaagcatcacggtcagcgttgtctcaggagaagcgtggagcggatatggagaatataaaggaattgcgtcgaactatcttgccgagctgcaagaaggagatacgattacgtgctttatttccacaccgcagtcagaatttacgctgccaaaagaccctgaaacgccgcttatcatggtcggaccgggaacaggcgtcgcgccgtttagaggctttattcaggcgcgcaaacagctaaaagaacaaggacagtcacttggagaagcacatttatacttcggctgccgttcacctcatgaagactatctgtatcaagaagagcttgaaaacgcccaaagcgaaggcatcattacgcttcataccgctttttctcgcatgccaaatcagccgaaaacatacgttcagcacgtaatggaacaagacggcaagaaattgattgaacttcttgatcaaggagcgcacttctatatttgcggagacggaagccaaatggcacctgccgttgaagcaacgcttatgaaaagctatgctgacgttcaccaagtgagtgaagcagacgctcgcttatggctgcagcagctagaagaaaaaggccgatacgcaaaagacgtgtgggctggg

SEQ ID NO: 80 - protein, 1049 aa, synthetic construct
  REGION 1..1049: note = Variant of cytochrome P450
MTIKEMPQPKTFGELKNLPLLNTDKPVQALMRIADELGEIFKFEAPGSVTRFLSSQRLIKEACDESRFDKNLSQALKFARDFLGDGLFTSWTHEPNWKKAHNILLPSFSQRAMKRYHAMMVDIAVQLVQKWERLNADEHIEVSEDMTRLTLDTIGLCGFNYRFNSFYRDQPHPFIVSMVRALDEVMNKLQRANPDDPAYDENKRQCQEDIKVMNDYVDKIIADRKARGEQSHDLLTQMLNGKDPETGEPLDDGNISYQIITFLIAGHETTSGLLSFALYFLVKNPHVLQKVAEEAARVLVDPVPSYKQVKQLKYVGMVLNEALRLWPTAPAFSLYAKEDTVLGGEYPLTKGDEVMVLIPQLHRDKTIWGDDVEEFRPERFENPSAIPQHAFKPFGNGQRACIGQQFALHEATLVLGMMLKHFDFEDHTNYELDIKETLTLKPEGFVVKAKSKKIPLGGIPSPSTEQSAKKVRKKAENAHNTPLLVLYGSNAGTAEGTARDLADIAMSKGFAPQVATLDSHAGNLPREGAVLIVTASYNGHPPDNAKQFVDWLDQASADEVNGVRYSVFGCGDKTWAATYQKVPAFIDETLAAKGAENIADRGEADASDDFEGTYEEWRDHMWSDVAAYFNLDIENSEDNKSTLSLQFVDSAADMPLAKMHGALSTNVVASKELQQPGSARSTRHLEIELPKEASYQEGDHLGVIPRNYEGIVNRVTARFGLSASQQIRLEAEEEKLAHLPLAKTVSVEELLQYVELQDPVTRTQLRAMAAKTVCPPHKVELEALLEKQAYKEQVLAKRLTMLELLEKYPACEMKFSEFIALLPSIRPRYYSISSSPRVDEKQASITVSVVSGEAWSGYGEYKGIASNYLAELQEGDTITCFISTPQSEFTLPKDPETPLIMVGPGTGVAPFRGFIQARKQLKEQGQSLGEAHLYFGCRSPHEDYLYQEELENAQSEGIITLHTAFSRMPNQPKTYVQHVMEQDGKKLIELLDQGAHFYICGDGSQMAPAVEATLMKSYADVHQVSEADARLWLQQLEEKGRYAKDVWAG

SEQ ID NO: 81 - DNA, 3147 bp, synthetic construct
  misc_feature 1..3147: note = Variant of cytochrome P450
  source 1..3147: mol_type = other DNA
atgacaataaaggaaatgccgcagccgaaaacgtttggagaacttaaaaatttaccgttattaaacacagataaaccggttcaagctttgatgcgtattgcggatgaattaggagaaatctttaaattcgaggcgcctggtagcgtaacgcgctttttatcaagtcagcgtctaattaaagaagcatgcgatgaatcacgctttgataaaaacttaagtcaagcgcttaaatttgcacgtgattttcttggagacgggttatttacaagctggacgcatgaaccgaattggaaaaaagcgcataatatcttacttccaagctttagtcagcgtgcaatgaaacgttatcatgcgatgatggtcgatatcgccgtgcagcttgttcaaaagtgggagcgtctaaatgcagatgagcatattgaagtatcggaagacatgacacgtttaacgcttgatacaattggtctttgcggctttaactatcgctttaacagcttttaccgagatcagcctcatccatttattgtgagtatggtccgtgcactggatgaagtaatgaacaagctgcagcgagcaaatccagacgacccagcttatgatgaaaacaagcgccagtgtcaagaagatatcaaggtgatgaacgactatgtagataaaattattgcagatcgcaaagcaaggggtgaacaaagccatgatttattaacgcagatgctaaacggaaaagatccagaaacgggtgagccgcttgatgacgggaacattagctatcaaattattacattcttaattgcgggacacgaaacaacaagtggtcttttatcatttgcgctgtatttcttagtgaaaaatccacatgtattacaaaaagtagcagaagaagcagcacgagttctagtagatcctgttccaagctacaaacaagtcaaacagcttaaatatgtcggcatggtcttaaacgaagcgctgcgcttatggccaactgctcctgcgttttccctatatgcaaaagaagatacggtgcttggaggagaatatcctttaaccaaaggcgacgaagtaatggttctgattcctcagcttcaccgtgataaaacaatttggggagacgatgtggaggagttccgtccagagcgttttgaaaatccaagtgcgattccgcagcatgcgtttaaaccgtttggaaacggtcagcgtgcgtgtatcggtcagcagttcgctcttcatgaagcaacgctggtacttggtatgatgctaaaacactttgactttgaagatcatacaaactacgagctcaagattaaagaaactttaacgttaaaacctgaaggctttgtggtaaaagcaaaatcgaaaaaaattccgcttggcggtattccttcacctagcactgaacagtctgctaaaaaagtacgcaaaaaggcagaaaacgctcataatacgccgctgcttgtgctatacggttcaaatgcgggaacagctgaaggaacggcgcgtgatttagcagatattgcaatgagcaaaggatttgcaccgcaggtcgcaacgcttgattcacacgccggaaatcttccgcgcgaaggagctgtattaattgtaacggcgtcttataacggtcatccgcctgataacgcaaagcaatttgtccgctggttagaccaagcgtctgctgatgaagtaaaaggcgttcgctactccgtatttggatgcggcgataaaaactgggctgcgacgtatcaaaaagtgcctgcttttatcgatgaaacgcttgccgctaaaggggcagaaaacatcgctgaccgcggtgaagcagatgcaagcgacgactttgaaggcacatatgaagaatggcgtgatcatatgtggagtgacgtagcagcctactttaacctcgacattgaaaacagtgaagataataaatctactctttcacttcaatttgtcgacagcgccgcggatatgccgcttgcgaaaatgcacggtgcgttttcaacgaacgtcgtagcaagcaaagaacttcaacagccaggcagtgcacgaagcacgcgacatcttgaaattgaacttccaaaagaagcttcttatcaagaaggagatcatttaggtgttattcctcgcaactatgaaggaatagtaaaccgtgtaacagcaaggttcggcctaagcgcatcacagcaaatccgtctggaagcagaagaagaaaaattagctcatttgccactcgctaaaacagtatccgtagaagagcttctgcaatacgtggagcttcaagatcctgttacgcgcacgcagcttcgcgcaatggctgctaaaacggtctgcccgccgcataaagtagagcttgaagccttgcttgaaaagcaagcctacaaagaacaagtgctggcaaaacgtttaacaatgcttgaactgcttgaaaaatacccggcgtgtgaaatgaaattcagcgaatttatcgcccttctgccaagcatacgcccgcgctattactcgatttcttcatcacctcgtgtcgatgaaaaacaagcaagcatcacggtcagcgttgtctcaggagaagcgtggagcggatatggagaatataaaggaattgcgtcgaactatcttgccgagctgcaagaaggagatacgattacgtgctttatttccacaccgcagtcagaatttacgctgccaaaagaccctgaaacgccgcttatcatggtcggaccgggaacaggcgtcgcgccgtttagaggctttgtgcaggcgcgcaaacagctaaaagaacaaggacagtcacttggagaagcacatttatacttcggctgccgttcacctcatgaagactatctgtatcaagaagagcttgaaaacgcccaaagcgaaggcatcattacgcttcataccgctttttctcgcatgccaaatcagccgaaaacatacgttcagcacgtaatggaacaagacggcaagaaattgattgaacttcttgatcaaggagcgcacttctatatttgcggagacggaagccaaatggcacctgccgttgaagcaacgcttatgaaaagctatgctgacgttcaccaagtgagtgaagcagacgctcgcttatggctgcagcagctagaagaaaaaggccgatacgcaaaagacgtgtgggctggg

SEQ ID NO: 82 - protein, 1049 aa, synthetic construct
  REGION 1..1049: note = Variant of cytochrome P450
MTIKEMPQPKTFGELKNLPLLNTDKPVQALMRIADELGEIFKFEAPGSVTRFLSSQRLIKEACDESRFDKNLSQALKFARDFLGDGLFTSWTHEPNWKKAHNILLPSFSQRAMKRYHAMMVDIAVQLVQKWERLNADEHIEVSEDMTRLTLDTIGLCGFNYRFNSFYRDQPHPFIVSMVRALDEVMNKLQRANPDDPAYDENKRQCQEDIKVMNDYVDKIIADRKARGEQSHDLLTQMLNGKDPETGEPLDDGNISYQIITFLIAGHETTSGLLSFALYFLVKNPHVLQKVAEEAARVLVDPVPSYKQVKQLKYVGMVLNEALRLWPTAPAFSLYAKEDTVLGGEYPLTKGDEVMVLIPQLHRDKTIWGDDVEEFRPERFENPSAIPQHAFKPFGNGQRACIGQQFALHEATLVLGMMLKHFDFEDHTNYELKIKETLTLKPEGFVVKAKSKKIPLGGIPSPSTEQSAKKVRKKAENAHNTPLLVLYGSNAGTAEGTARDLADIAMSKGFAPQVATLDSHAGNLPREGAVLIVTASYNGHPPDNAKQFVRWLDQASADEVKGVRYSVFGCGDKNWAATYQKVPAFIDETLAAKGAENIADRGEADASDDFEGTYEEWRDHMWSDVAAYFNLDIENSEDNKSTLSLQFVDSAADMPLAKMHGAFSTNVVASKELQQPGSARSTRHLEIELPKEASYQEGDHLGVIPRNYEGIVNRVTARFGLSASQQIRLEAEEEKLAHLPLAKTVSVEELLQYVELQDPVTRTQLRAMAAKTVCPPHKVELEALLEKQAYKEQVLAKRLTMLELLEKYPACEMKFSEFIALLPSIRPRYYSISSSPRVDEKQASITVSVVSGEAWSGYGEYKGIASNYLAELQEGDTITCFISTPQSEFTLPKDPETPLIMVGPGTGVAPFRGFVQARKQLKEQGQSLGEAHLYFGCRSPHEDYLYQEELENAQSEGIITLHTAFSRMPNQPKTYVQHVMEQDGKKLIELLDQGAHFYICGDGSQMAPAVEATLMKSYADVHQVSEADARLWLQQLEEKGRYAKDVWAG

SEQ ID NO: 83 - DNA, 3147 bp, synthetic construct
  misc_feature 1..3147: note = Variant of cytochrome P450
  source 1..3147: mol_type = other DNA
atgacaataaaggaaatgccgcagccgaaaacgtttggagaacttaaaaatttaccgttattaaacacagataaaccggttcaagctttgatgcgtattgcggatgaattaggagaaatctttaaattcgaggcgcctggtagcgtaacgcgctttttatcaagtcagcgtctaattaaagaagcatgcgatgaatcacgctttgataaaaacttaagtcaagcgcttaaatttgcacgtgattttcttggagacgggttatttacaagctggacgcatgaaccgaattggaaaaaagcgcataatatcttacttccaagctttagtcagcgtgcaatgaaacgttatcatgcgatgatggtcgatatcgccgtgcagcttgttcaaaagtgggagcgtctaaatgcagatgagcatattgaagtatcggaagacatgacacgtttaacgcttgatacaattggtctttgcggctttaactatcgctttaacagcttttaccgagatcagcctcatccatttattgtgagtatggtccgtgcactggatgaagtaatgaacaagctgcagcgagcaaatccagacgacccagcttatgatgaaaacaagcgccagtgtcaagaagatatcaaggtgatgaacgactatgtagataaaattattgcagatcgcaaagcaaggggtgaacaaagccatgatttattaacgcagatgctaaacggaaaagatccagaaacgggtgagccgcttgatgacgggaacattagctatcaaattattacattcttaattgcgggacacgaaacaacaagtggtcttttatcatttgcgctgtatttcttagtgaaaaatccacatgtattacaaaaagtagcagaagaagcagcacgagttctagtagatcctgttccaagctacaaacaagtcaaacagcttaaatatgtcggcatggtcttaaacgaagcgctgcgcttatggccaactgctcctgcgttttccctatatgcaaaagaagatacggtgcttggaggagaatatcctttaaccaaaggcgacgaagtaatggttctgattcctcagcttcaccgtgataaaacaatttggggagacgatgtggaggagttccgtccagagcgttttgaaaatccaagtgcgattccgcagcatgcgtttaaaccgtttggaaacggtcagcgtgcgtgtatcggtcagcagttcgctcttcatgaagcaacgctggtacttggtatgatgctaaaacactttgactttgaagatcatacaaactacgagctcgatattaaagaacggttaacgttaaaacctgaaggctttgtggtaaaagcaaaatcgaaaaaaattccgcttggcggtattccttcacctagcactgaacagtctgctaaaaaagtacgcaaaaaggcagaaaacgctcataatacgccgctgcttgtgctatacggttcaaatgcgggaacagctgaaggaacggcgcgtgatttagcagatattgcaatgagcaaaggatttgcaccgcaggtcgcaacgcttgattcacacgccggaaatcttccgcgcgaaggagctgtattaattgtaacggcgtcttataacggtcatccgcctgataacgcaaagcaatttgtcgactggttagaccaagcgtctgctgatgaagtaaaaggcgttcgctactccgtatttggatgcggcgataaaaactgggctgcgacgtatcaaaaagtgcctgcttttatcgatgaaacgcttgccgctaaaggggcagaaaacatcgctgaccgcggtgaagcagatgcaagcgacgactttgaaggcacatatgaagaatggcgtgatcatatgtggagtgacgtagcagcctactttaacctcgacattgaaaacagtgaagataataaatctactctttcacttcaatttgtcgacagcgccgcggatatgccgcttgcgaaaatgcacggtgcgttttcaacgaacgtcgtagcaagcaaagaacttcaacagccaggcagtgcacgaagcacgcgacatcttgaaattgaacttccaaaagaagcttcttatcaagaaggagatcatttaggtgttattcctcgcaactatgaaggaatagtaaaccgtgtaacagcaaggttcggcctaagcgcatcacagcaaatccgtctggaagcagaagaagaaaaattagctcatttgccactcgctaaaacagtatccgtagaagagcttctgcaatacgtggagcttcaagatcctgttacgcgcacgcagcttcgcgcaatggctgctaaaacggtctgcccgccgcataaagtagagcttgaagccttgcttgaaaagcaagcctacaaagaacaagtgctggcaaaacgtttaacaatgcttgaactgcttgaaaaatacccggcgtgtgaaatgaaattcagcgaatttatcgcccttctgccaagcatacgcccgcgctattactcgatttcttcatcacctcgtgtcgatgaaaaacaagcaagcatcacggtcagcgttgtctcaggagaagcgtggagcggatatggagaatataaaggaattgcgtcgaactatcttgccgagctgcaagaaggagatacgattacgtgctttatttccacaccgcagtcagaatttacgctgccaaaagaccctgaaacgccgcttatcatggtcggaccgggaacaggcgtcgcgccgtttagaggctttgtgcaggcgcgcaaacagctaaaagaacaaggacagtcacttggagaagcacatttatacttcggctgccgttcacctcatgaagactatctgtatcaagaagagcttgaaaacgcccaaagcgaaggcatcattacgcttcataccgctttttctcgcatgccaaatcagccgaaaacatacgttcagcacgtaatggaacaagacggcaagaaattgattgaacttcttgatcaaggagcgcacttctatatttgcggagacggaagccaaatggcacctgccgttgaagcaacgcttatgaaaagctatgctgacgttcaccaagtgagtgaagcagacgctcgcttatggctgcagcagctagaagaaaaaggccgatacgcaaaagacgtgtgggctggg

SEQ ID NO: 84 - protein, 1049 aa, synthetic construct
  REGION 1..1049: note = Variant of cytochrome P450
MTIKEMPQPKTFGELKNLPLLNTDKPVQALMRIADELGEIFKFEAPGSVTRFLSSQRLIKEACDESRFDKNLSQALKFARDFLGDGLFTSWTHEPNWKKAHNILLPSFSQRAMKRYHAMMVDIAVQLVQKWERLNADEHIEVSEDMTRLTLDTIGLCGFNYRFNSFYRDQPHPFIVSMVRALDEVMNKLQRANPDDPAYDENKRQCQEDIKVMNDYVDKIIADRKARGEQSHDLLTQMLNGKDPETGEPLDDGNISYQIITFLIAGHETTSGLLSFALYFLVKNPHVLQKVAEEAARVLVDPVPSYKQVKQLKYVGMVLNEALRLWPTAPAFSLYAKEDTVLGGEYPLTKGDEVMVLIPQLHRDKTIWGDDVEEFRPERFENPSAIPQHAFKPFGNGQRACIGQQFALHEATLVLGMMLKHFDFEDHTNYELDIKERLTLKPEGFVVKAKSKKIPLGGIPSPSTEQSAKKVRKKAENAHNTPLLVLYGSNAGTAEGTARDLADIAMSKGFAPQVATLDSHAGNLPREGAVLIVTASYNGHPPDNAKQFVDWLDQASADEVKGVRYSVFGCGDKNWAATYQKVPAFIDETLAAKGAENIADRGEADASDDFEGTYEEWRDHMWSDVAAYFNLDIENSEDNKSTLSLQFVDSAADMPLAKMHGAFSTNVVASKELQQPGSARSTRHLEIELPKEASYQEGDHLGVIPRNYEGIVNRVTARFGLSASQQIRLEAEEEKLAHLPLAKTVSVEELLQYVELQDPVTRTQLRAMAAKTVCPPHKVELEALLEKQAYKEQVLAKRLTMLELLEKYPACEMKFSEFIALLPSIRPRYYSISSSPRVDEKQASITVSVVSGEAWSGYGEYKGIASNYLAELQEGDTITCFISTPQSEFTLPKDPETPLIMVGPGTGVAPFRGFVQARKQLKEQGQSLGEAHLYFGCRSPHEDYLYQEELENAQSEGIITLHTAFSRMPNQPKTYVQHVMEQDGKKLIELLDQGAHFYICGDGSQMAPAVEATLMKSYADVHQVSEADARLWLQQLEEKGRYAKDVWAG

SEQ ID NO: 85 - DNA, 3147 bp, synthetic construct
  misc_feature 1..3147: note = Variant of cytochrome P450
  source 1..3147: mol_type = other DNA
atgacaataaaggaaatgccgcagccgaaaacgtttggagaacttaaaaatttaccgttattaaacacagataaaccggttcaagctttgatgcgtattgcggatgaattaggagaaatctttaaattcgaggcgcctggtagcgtaacgcgctttttatcaagtcagcgtctaattaaagaagcatgcgatgaatcacgctttgataaaaacttaagtcaagcgcttaaatttgcacgtgattttcttggagacgggttatttacaagctggacgcatgaaccgaattggaaaaaagcgcataatatcttacttccaagctttagtcagcgtgcaatgaaacgttatcatgcgatgatggtcgatatcgccgtgcagcttgttcaaaagtgggagcgtctaaatgcagatgagcatattgaagtatcggaagacatgacacgtttaacgcttgatacaattggtctttgcggcattaactatcgctttaacagcttttaccgagatcagcctcatccatttattgtgagtatggtccgtgcactggatgaagtaatgaacaagctgcagcgagcaaatccagacgacccagcttatgatgaaaacaagcgccagtgtcaagaagatatcaaggtgatgaacgactatgtagataaaattattgcagatcgcaaagcaaggggtgaacaaagccatgatttattaacgcagatgctaaacggaaaagatccagaaacgggtgagccgcttgatgacgggaacattagctatcaaattattacattcttaattgcgggacacgaaacaacaagtggtcttttatcatttgcgctgtatttcttagtgaaaaatccacatgtattacaaaaagtagcagaagaagcagcacgagttctagtagatcctgttccaagctacaaacaagtcaaacagcttaaatatgtcggcatggtcttaaacgaagcgctgcgcttatggccaactgctcctgcgttttccctatatgcaaaagaagatacggtgcttggaggagaatatcctttaaccaaaggcgacgaagtaatggttctgattcctcagcttcaccgtgataaaacaatttggggagacgatgtggaggagttccgtccagagcgttttgaaaatccaagtgcgattccgcagcatgcgtttaaaccgtttggaaacggtcagcgtgcgtgtatcggtcagcagttcgctcttcatgaagcaacgctggtacttggtatgatgctaaaacactttgactttgaagatcatacaaactacgagctcgatattaaagaaactttaacgttaaaacctgaaggctttgtggtaaaagcaaaatcgaaaaaaattccgcttggcggtattccttcacctagcactgaacagtctgctaaaaaagtacgcaaaaaggcagaaaacgctcataatacgccgctgcttgtgctatacggttcaaatgcgggaacagctgaaggaacggcgcgtgatttagcagatattgcaatgagcaaaggatttgcaccgcaggtcgcaacgcttgattcacacgccggaaatcttccgcgcgaaggagctgtattaattgtaacggcgtcttataacggtcatccgcctgataacgcaaagcaatttgtcgactggttagaccaagcgtctgctgatgaagtaaaaggcgttcgctactccgtatttggatgcggcgataaaaactgggctgcgacgtatcaaaaagtgcctgcttttatcgatgaaacgcttgccgctaaaggggcagaaaacatcgctgaccgcggtgaagcagatgcaagcgacgactttgaaggcacatatgaagaatggcgtgatcatatgtggagtgacgtagcagcctactttaacctcgacattgaaaacagtgaagataataaatctactctttcacttcaatttgtcgacagcgccgcggatatgccgcttgcgaaaatgcacggtgcgttttcaacgaacgtcgtagcaagcaaagaacttcaacagccaggcagtgcacgaagcacgcgacatcttgaaattgaacttccaaaagaagcttcttatcaagaaggagatcatttaggtgttattcctcgcaactatgaaggaatagtaaaccgtgtaacagcaaggttcggcctaagcgcatcacagcaaatccgtctggaagcagaagaagaaaaattagctcatttgccactcgctaaaacagtatccgtagaagagcttctgcaatacgtggagcttcaagatcctgttacgcgcacgcagcttcgcgcaatggctgctaaaacggtctgcccgccgcataaagtagagcttgaagccttgcttgaaaagcaagcctacaaagaacaagtgctggcaaaacgtttaacaatgcttgaactgcttgaaaaatacccggcgtgtgaaatgaaattcagcgaatttatcgcccttctgccaagcatacgcccgcgctattactcgatttcttcatcacctcgtgtcgatgaaaaacaagcaagcatcacggtcagcgttgtctcaggagaagcgtggagcggatatggagaatataaaggaattgcgtcgaactatcttgccgagctgcaagaaggagatacgattacgtgctttatttccacaccgcagtcagaatttacgctgccaaaagaccctgaaacgccgcttatcatggtcggaccgggaacaggcgtcgcgccgtttagaggctttgtgcaggcgcgcaaacagctaaaagaacaaggacagtcacttggagaagcacatttatacttcggctgccgttcacctcatgaagactatctgtatcaagaagagcttgaaaacgcccaaagcgaaggcatcattacgcttcataccgctttttctcgcatgccaaatcagccgaaaacatacgttcagcacgtaatggaacaagacggcaagaaattgattgaacttcttgatcaaggagcgcacttctatatttgcggagacggaagccaaatggcacctgccgttgaagcaacgcttatgaaaagctatgctgacgttcaccaagtgagtgaagcagacgctcgcttatggctgcagcagctagaagaaaaaggccgatacgcaaaagacgtgtgggctggg

SEQ ID NO: 86 - protein, 1049 aa, synthetic construct
  REGION 1..1049: note = Variant of cytochrome P450
MTIKEMPQPKTFGELKNLPLLNTDKPVQALMRIADELGEIFKFEAPGSVTRFLSSQRLIKEACDESRFDKNLSQALKFARDFLGDGLFTSWTHEPNWKKAHNILLPSFSQRAMKRYHAMMVDIAVQLVQKWERLNADEHIEVSEDMTRLTLDTIGLCGINYRFNSFYRDQPHPFIVSMVRALDEVMNKLQRANPDDPAYDENKRQCQEDIKVMNDYVDKIIADRKARGEQSHDLLTQMLNGKDPETGEPLDDGNISYQIITFLIAGHETTSGLLSFALYFLVKNPHVLQKVAEEAARVLVDPVPSYKQVKQLKYVGMVLNEALRLWPTAPAFSLYAKEDTVLGGEYPLTKGDEVMVLIPQLHRDKTIWGDDVEEFRPERFENPSAIPQHAFKPFGNGQRACIGQQFALHEATLVLGMMLKHFDFEDHTNYELDIKETLTLKPEGFVVKAKSKKIPLGGIPSPSTEQSAKKVRKKAENAHNTPLLVLYGSNAGTAEGTARDLADIAMSKGFAPQVATLDSHAGNLPREGAVLIVTASYNGHPPDNAKQFVDWLDQASADEVKGVRYSVFGCGDKNWAATYQKVPAFIDETLAAKGAENIADRGEADASDDFEGTYEEWRDHMWSDVAAYFNLDIENSEDNKSTLSLQFVDSAADMPLAKMHGAFSTNVVASKELQQPGSARSTRHLEIELPKEASYQEGDHLGVIPRNYEGIVNRVTARFGLSASQQIRLEAEEEKLAHLPLAKTVSVEELLQYVELQDPVTRTQLRAMAAKTVCPPHKVELEALLEKQAYKEQVLAKRLTMLELLEKYPACEMKFSEFIALLPSIRPRYYSISSSPRVDEKQASITVSVVSGEAWSGYGEYKGIASNYLAELQEGDTITCFISTPQSEFTLPKDPETPLIMVGPGTGVAPFRGFVQARKQLKEQGQSLGEAHLYFGCRSPHEDYLYQEELENAQSEGIITLHTAFSRMPNQPKTYVQHVMEQDGKKLIELLDQGAHFYICGDGSQMAPAVEATLMKSYADVHQVSEADARLWLQQLEEKGRYAKDVWAG

SEQ ID NO: 87 - DNA, 3147 bp, synthetic construct
  misc_feature 1..3147: note = Variant of cytochrome P450
  source 1..3147: mol_type = other DNA
atgacaataaaggaaatgccgcagccgaaaacgtttggagaacttaaaaatttaccgttattaaacacagataaaccggttcaagctttgatgcgtattgcggatgaattaggagaaatctttaaattcgaggcgcctggtagcgtaacgcgctttttatcaagtcagcgtctaattaaagaagcatgcgatgaatcacgctttgataaaaacttaagtcaagcgcttaaatttgcacgtgattttcttggagacgggttatttacaagctggacgcatgaaccgaattggaaaaaagcgcataatatcttaggcccaagctttagtcagcgtgcaatgaaacgttatcatgcgatgatggtcgatatcgccgtgcagcttgttcaaaagtgggagcgtctaaatgcagatgagcatattgaagtatcggaagacatgacacgtttaacgcttgatacaattggtctttgcggctttaactatcgctttaacagcttttaccgagatcagcctcatccatttattgtgagtatggtccgtgcactggatgaagtaatgaacaagctgcagcgagcaaatccagacgacccagcttatgatgaaaacaagcgccagtgtcaagaagatatcaaggtgatgaacgactatgtagataaaattattgcagatcgcaaagcaaggggtgaacaaagccatgatttattaacgcagatgctaaacggaaaagatccagaaacgggtgagccgcttgatgacgggaacattcgttatcaaattattacattcttaattgcgggacacgaaacaacaagtggtcttttatcatttgcgctgtatttcttagtgaaaaatccacatgtattacaaaaagtagcagaagaagcagcacgagttctagtagatcctgttccaagctacaaacaagtcaaacagcttaaatatgtcggcatggtcttaaacgaagcgctgcgcttatggccaactgctcctgcgttttccctatatgcaaaagaagatacggtgcttggaggagaatatcctttaaccaaaggcgacgaagtaatggttctgattcctcagcttcaccgtgataaaacaatttggggagacgatgtggaggagttccgtccagagcgttttgaaaatccaagtgcgattccgcagcatgcgtttaaaccgtttggaaacggtcagcgtgcgtgtatcggtcagcagttcgctcttcatgaagcaacgctggtacttggtatgatgctaaaacactttgactttgaagatcatacaaactacgagctcaagattaaagaaactttaacgttaaaacctgaaggctttgtggtaaaagcaaaatcgaaaaagattccgcttggcggtattccttcacctagcactgaacagtctgctaaaaaagtacgcaaaaaggcagaaaacgctcataatacgccgctgcttgtgctatacggttcaaatgcgggaacagctgaaggaacggcgcgtgatttagcagatattgcaatgagcaaaggatttgcaccgcaggtcgcaacgcttgattcacacgccggaaatcttccgcgcgaaggagctgtattaattgtaacggcgtcttataacggtcatccgcctgataacgcaaagcaatttgtccgctggttagaccaagcgtctgctgatgaagtaaaaggcgttcgctactccgtatttggatgcggcgataaaaactgggctgcgacgtatcaaaaagtgcctgcttttatcgatgaaacgcttgccgctaaaggggcagaaaacatcgctcgccgcggtgaagcagatgcaagcgacgactttgaaggcacatatgaagaatggcgtgatcatatgtggagcgacgtagcagcctactttaacctcgacattgaaaacagtgaagataataaatctactctttcacttcaatttgtcgacagcgccgcggatatgccgcttgcgaaaatgcacggtgcgttctcaacgaacgtcgtagcaagcaaagaacttcaacagccaggcagtgcacgaagcacgcaacatcttgaaattgaacttccaaaagaagcttcttatcaagaaggagatcatttaggtgttattcctcgcaactatgaaggaatagtaaaccgtgtaacagcaaggttcggcctaagcgcatcacagcaaatccgtctggaagcagaagaagaaaaattagctcatttgccactcgctaaaacagtatccgtagaagagcttctgcaatacgtggagcttcaagatcctgctacgcgcacgcagcttcgcgcaatggctgctaaaacggtctgcccgccgcataaagtagagcttgaagccttgcttgaaaagcaagcctacaaagaacaagtgctggcaaaacgtttaacaatgcttgaactgcttgaaaaatacccggcgtgtgaaatgaaattcagcgaatttatcgcccttctgccaagcctgcgcccgcgctattactcgatttcttcatcacctcgtgtcgatgaaaaacaagcaagcatcacggtcagcgttgtctcaggagaagcgtggagcggatatggagaatataaaggaattgcgtcgaactatcttgccgagctgcaagaaggagatacgattacgtgctttatttccacaccgcagtcagaatttacgctgccaaaagaccctgaaacgccgcttatcatggtcggaccgggaacaggcgtcgcgccgtttagaggctttgttcaggcgcgcaaacagctaaaagaacaaggacagtcacttggagaagcacatttatacttcggctgccgttcacctcatgaagactatctgtatcaagaagagcttgaaaacgcccaaagcgaaggcatcattacgcttcataccgctttttctcgcatgccaaatcagccgaaaacatacgttcagcacgtaatggaacaagacggcaagaaattgattgaacttcttgatcaaggagcgcacttctatatttgcggagacggaagccaaatggcacctgccgttgaagcaacgcttatgaaaagctatgctgacgttcaccaagtgagtgaagcagacgctcgcttatggctgcagcagctagaagaaaaaggccgatacgcaaaagacgtgtgggctggg

SEQ ID NO: 88 - protein, 1049 aa, synthetic construct
  REGION 1..1049: note = Variant of cytochrome P450
MTIKEMPQPKTFGELKNLPLLNTDKPVQALMRIADELGEIFKFEAPGSVTRFLSSQRLIKEACDESRFDKNLSQALKFARDFLGDGLFTSWTHEPNWKKAHNILGPSFSQRAMKRYHAMMVDIAVQLVQKWERLNADEHIEVSEDMTRLTLDTIGLCGFNYRFNSFYRDQPHPFIVSMVRALDEVMNKLQRANPDDPAYDENKRQCQEDIKVMNDYVDKIIADRKARGEQSHDLLTQMLNGKDPETGEPLDDGNIRYQIITFLIAGHETTSGLLSFALYFLVKNPHVLQKVAEEAARVLVDPVPSYKQVKQLKYVGMVLNEALRLWPTAPAFSLYAKEDTVLGGEYPLTKGDEVMVLIPQLHRDKTIWGDDVEEFRPERFENPSAIPQHAFKPFGNGQRACIGQQFALHEATLVLGMMLKHFDFEDHTNYELKIKETLTLKPEGFVVKAKSKKIPLGGIPSPSTEQSAKKVRKKAENAHNTPLLVLYGSNAGTAEGTARDLADIAMSKGFAPQVATLDSHAGNLPREGAVLIVTASYNGHPPDNAKQFVRWLDQASADEVKGVRYSVFGCGDKNWAATYQKVPAFIDETLAAKGAENIARRGEADASDDFEGTYEEWRDHMWSDVAAYFNLDIENSEDNKSTLSLQFVDSAADMPLAKMHGAFSTNVVASKELQQPGSARSTQHLEIELPKEASYQEGDHLGVIPRNYEGIVNRVTARFGLSASQQIRLEAEEEKLAHLPLAKTVSVEELLQYVELQDPATRTQLRAMAAKTVCPPHKVELEALLEKQAYKEQVLAKRLTMLELLEKYPACEMKFSEFIALLPSLRPRYYSISSSPRVDEKQASITVSVVSGEAWSGYGEYKGIASNYLAELQEGDTITCFISTPQSEFTLPKDPETPLIMVGPGTGVAPFRGFVQARKQLKEQGQSLGEAHLYFGCRSPHEDYLYQEELENAQSEGIITLHTAFSRMPNQPKTYVQHVMEQDGKKLIELLDQGAHFYICGDGSQMAPAVEATLMKSYADVHQVSEADARLWLQQLEEKGRYAKDVWAG

SEQ ID NO: 89 - DNA, 3147 bp, synthetic construct
  misc_feature 1..3147: note = Variant of cytochrome P450
  source 1..3147: mol_type = other DNA
atgacaataaaggaaatgccgcagccgaaaacgtttggagaacttaaaaatttaccgttattaaacacagataaaccggttcaagctttgatgcgtattgcggatgaattaggagaaatctttaaattcgaggcgcctggtagcgtaacgcgctttttatcaagtcagcgtctaattaaagaagcatgcgatgaatcacgctttgataaaaacttaagtcaagcgcttaaatttgcacgtgattttcttggagacgggttatttacaagctggacgcatgaaccgaattggaaaaaagcgcataatatcttacttccaagctttagtcagcgtgcaatgaaacgttatcatgcgatgatggtcgatatcgccgtgcagcttgttcaaaagtgggagcgtctaaatgcagatgagcatattgaagtatcggaagacatgacacgtttaacgcttgatacaattggtctttgcggctttaactatcgctttaacagcttttaccgagatcagcctcatccatttattgtgagtatggtccgtgcactggatgaagtaatgaacaagctgcagcgagcaaatccagacgacccagcttatgatgaaaacaagcgccagtgtcaagaagatatcaaggtgatgaacgactatgtagataaaattattgcagatcgcaaagcaaggggtgaacaaagccatgatttattaacgcagatgctaaacggaaaagatccagaaacgggtgagccgcttgatgacgggaacattcgttatcaaattattacattcttaattgcgggacacgaaacaacaagtggtcttttatcatttgcgctgtatttcttagtgaaaaatccacatgtattacaaaaagtagcagaagaagcagcacgagttctagtagatcctgttccaagctacaaacaagtcaaacagcttaaatatgtcggcatggtcttaaacgaagcgctgcgcttatggccaactgctcctgcgttttccctatatgcaaaagaagatacggtgcttggaggagaatatcctttaacgaaaggcgacgaagtaatggttctgattcctcagcttcaccgtgataaaacaatttggggagacgatgtggaggagttccgtccagagcgttttgaaaatccaagtgcgattccgcagcatgcgtttaaaccgtttggaaacggtcagcgtgcgtgtatcggtcagcagttcgctcttcatgaagcaacgctggtacttggtatgatgctaaaacactttgactttgaagatcatacaaactacgagctcgatattaaagaaactttaacgttaaaacctgaaggctttgtggtaaaagcaaaatcgaaaaagattccgcttggcggtattccttcacctagcactgaacagtctgctaaaaaagtacgcaaaaaggcagaaaacgctcataatacgccgctgcttgtgctatacggttcaaatgcgggaacagctgaaggaacggcgcgtgatttagcagatattgcaatgagcaaaggatttgcaccgcaggtcgcaacgcttgattcacacgccggaaatcttccgcgcgaaggagctgtattaattgtaacggcgtcttataacggtcatccgcctgataacgcaaagcaatttgtcgactggttagaccaagcgtctgctgatgaagtaaaaggcgttcgctactccgtatttggatgcggcgataaaaactgggctgcgacgtatcaaaaagtgcctgcttttatcgatgaaacgcttgccgctaaaggggcagaaaacatcgctgaccgcggtgaagcagatgcaagcgacgactttgaaggcacatatgaagaatggcgtgatcatatgtggagtgacgtagcagcctactttaacctcgacattgaaaacagtgaagataataaatctactctttcacttcaatttgtcgacagcgccgcggatatgccgcttgcgaaaatgcacggtgcgctgtcaacgaacgtcgtagcaagcaaagaacttcaacagccaggcagtgcacgaagcacgcgacatcttgaaattgaacttccaaaagaagcttcttatcaagaaggagatcatttaggtgttattcctcgcaactatgaaggaatagtaaaccgtgtaacagcaaggttcggcctaagcgcatcacagcaaatccgtctggaagcagaagaagaaaaattagctcatttgccactcgctaaaacagtatccgtagaagagcttctgcaatacgtggagcttcaagatcctgttacgcgcacgcagcttcgcgcaatggctgctaaaacggtctgcccgccgcataaagtagagcttgaagccttgcttgaaaagcaagcctacaaagaacaagtgctggcaaaacgtttaacaatgcttgaactgcttgaaaaatacccggcgtgtgaaatgaaattcagcgaatttatcgcccttctgccaagcatacgcccgcgctattactcgatttcttcatcacctcgtgtcgatgaaaaacaagcaagcatcacggtcagcgttgtctcaggagaagcgtggagcggatatggagaatataaaggaattgcgtcgaactatcttgccgagctgcaagaaggagatacgattacgtgctttatttccacaccgcagtcagaatttacgctgccaaaagaccctgaaacgccgcttatcatggtcggaccgggaacaggcgtcgcgccgtttagaggctttattcaggcgcgcaaacagctaaaagaacaaggacagtcacttggagaagcacatttatacttcggctgccgttcacctcatgaagactatctgtatcaagaagagcttgaaaacgcccaaagcgaaggcatcattacgcttcataccgctttttctcgcatgccaaatcagccgaaaacatacgttcagcacgtaatggaacaagacggcaagaaattgattgaacttcttgatcaaggagcgcacttctatatttgcggagacggaagccaaatggcacctgccgttgaagcaacgcttatgaaaagctatgctgacgttcaccaagtgagtgaagcagacgctcgcttatggctgcagcagctagaagaaaaaggccgatacgcaaaagacgtgtgggctggg

SEQ ID NO: 90 - protein, 1049 aa, synthetic construct
  REGION 1..1049: note = Variant of cytochrome P450
MTIKEMPQPKTFGELKNLPLLNTDKPVQALMRIADELGEIFKFEAPGSVTRFLSSQRLIKEACDESRFDKNLSQALKFARDFLGDGLFTSWTHEPNWKKAHNILLPSFSQRAMKRYHAMMVDIAVQLVQKWERLNADEHIEVSEDMTRLTLDTIGLCGFNYRFNSFYRDQPHPFIVSMVRALDEVMNKLQRANPDDPAYDENKRQCQEDIKVMNDYVDKIIADRKARGEQSHDLLTQMLNGKDPETGEPLDDGNIRYQIITFLIAGHETTSGLLSFALYFLVKNPHVLQKVAEEAARVLVDPVPSYKQVKQLKYVGMVLNEALRLWPTAPAFSLYAKEDTVLGGEYPLTKGDEVMVLIPQLHRDKTIWGDDVEEFRPERFENPSAIPQHAFKPFGNGQRACIGQQFALHEATLVLGMMLKHFDFEDHTNYELDIKETLTLKPEGFVVKAKSKKIPLGGIPSPSTEQSAKKVRKKAENAHNTPLLVLYGSNAGTAEGTARDLADIAMSKGFAPQVATLDSHAGNLPREGAVLIVTASYNGHPPDNAKQFVDWLDQASADEVKGVRYSVFGCGDKNWAATYQKVPAFIDETLAAKGAENIADRGEADASDDFEGTYEEWRDHMWSDVAAYFNLDIENSEDNKSTLSLQFVDSAADMPLAKMHGALSTNVVASKELQQPGSARSTRHLEIELPKEASYQEGDHLGVIPRNYEGIVNRVTARFGLSASQQIRLEAEEEKLAHLPLAKTVSVEELLQYVELQDPVTRTQLRAMAAKTVCPPHKVELEALLEKQAYKEQVLAKRLTMLELLEKYPACEMKFSEFIALLPSIRPRYYSISSSPRVDEKQASITVSVVSGEAWSGYGEYKGIASNYLAELQEGDTITCFISTPQSEFTLPKDPETPLIMVGPGTGVAPFRGFIQARKQLKEQGQSLGEAHLYFGCRSPHEDYLYQEELENAQSEGIITLHTAFSRMPNQPKTYVQHVMEQDGKKLIELLDQGAHFYICGDGSQMAPAVEATLMKSYADVHQVSEADARLWLQQLEEKGRYAKDVWAG

SEQ ID NO: 91 - DNA, 3147 bp, synthetic construct
  misc_feature 1..3147: note = Variant of cytochrome P450
  source 1..3147: mol_type = other DNA
atgacaattaaggaaatgcctcagcctaagacgtttggagaacttaaaaatttaccgttattaaacacagataaaccggttcaagctttgatgcgtattgcggatgaattaggagaaatctttaaattcgaggcgcctggtagcgtaacgcgctttttatcaagtcagcgtctaattaaagaagcatgcgatgaatcacgctttgataaaaacttaagtcaagcgcttaaatttgcacgtgattttcttggagacgggttatttacaagctggacgcatgaaccgaattggaaaaaagcgcataatatcttaggcccaagctttagtcagcgtgcaatgaaacgttatcatgcgatgatggtcgatatcgccgtgcagcttgttcaaaagtgggagcgtctaaatgcagatgagcatattgaagtatcggaagacatgacacgtttaacgcttgatacaattggtctttgcggctttaactatcgctttaacagcttttaccgagatcagcctcatccatttattgtgagtatggtccgtgcactggatgaagtaatgaacaagctgcagcgagcaaatccagacgacccagcttatgatgaaaacaagcgccagtgtcaagaagatatcaaggtgatgaacgactatgtagataaaattattgcagatcgcaaagcaaggggtgaacaaagccatgatttattaacgcagatgctaaacggaaaagatccagaaacgggtgagccgcttgatgacgggaacattcgttatcaaattattacattcttaattgcgggacacgaaacaacaagtggtcttttatcatttgcgctgtatttcttagtgaaaaatccacatgtattacaaaaagtagcagaagaagcagcacgagttctagtagatcctgttccaagctacaaacaagtcaaacagcttaaatatgtcggcatggtcttaaacgaagcgctgcgcttatggccaactgctcctgcgttttccctatatgcaaaagaagatacggtgcttggaggagaatatcctttaaccaaaggcgacgaagtaatggttctgattcctcagcttcaccgtgataaaacaatttggggagacgatgtggaggagttccgtccagagcgttttgaaaatccaagtgcgattccgcagcatgcgtttaaaccgtttggaaacggtcagcgtgcgtgtatcggtcagcagttcgctcttcatgaagcaacgctggtacttggtatgatgctaaaacactttgactttgaagatcatacaaactacgagctcgttattaaagaaactttaacgttaaaacctgaaggctttgtggtaaaagcaaaatcgaaaggcattccgcttggcggtattccttcacctagcactgaacagtctgctaaaaaagtacgcaaaaaggcagaaaacgctcataatacgccgctgcttgtgctatacggttcaaatgcgggaacagctgaaggaacggcgcgtgatttagcagatattgcaatgagcaaaggatttgcaccgcaggtcgcaacgcttgattcacacgccggaaatcttccgcgcgaaggagctgtattaattgtaacggcgtcttataacggtcatccgcctgataacgcaaagcaatttgtcgactggttagaccaagcgtctgctgatgaagtaaaaggcgttcgctactccgtatttggatgcggcgataaaaactgggctgcgacgtatcaaaaagtgcctgcttttatcgatgaaacgcttgccgctaaaggggcagaaaacatcgctgaccgcggtgaagcagatgcaagcgacgactttgaaggcacatatgaagaatggcgtgatcatatgtggagtgacgtagcagcctactttaacctcgacattgaaaacagtgaagataataaatctactctttcacttcaatttgtcgacagcgccgcggatatgccgcttgcgaaaatgcacggtgcgttttcaacgaacgtcgtagcaagcaaagaacttcaacagccaggcagtgcacgaagcacgcgacatcttgaaattgaacttccaaaagaagcttcttatcaagaaggagatcatttaggtgttattcctcgcaactatgaaggaatagtaaaccgtgtaacagcaaggttcggcctaagcgcatcacagcaaatccgtctggaagcagaagaagaaaaattagctcatttgccactcgctaaaacagtatccgtagaagagcttctgcaatacgtggagcttcaagatcctgttacgcgcacgcagcttcgcgcaatggctgctaaaacggtctgcccgccgcataaagtagagcttgaagccttgcttgaaaagcaagcctacaaagaacaagtgctggcaaaacgtttaacaatgcttgaactgcttgaaaaatacccggcgtgtgaaatgaaattcagcgaatttatcgcccttctgccaagcatacgcccgcgctattactcgatttcttcatcacctcgtgtcgatgaaaaacaagcaagcatcacggtcagcgttgtctcaggaccggcgtggagcggatatggagaatataaaggaattgcgtcgaactatcttgccgagctgcaagaaggagatacgattacgtgctttatttccacaccgcagtcagaatttacgctgccaaaagaccctgaaacgccgcttatcatggtcggaccgggaacaggcgtcgcgccgtttagaggctttgtgcaggcgcgcaaacagctaaaagaacaaggacagtcacttggagaagcacatttatacttcggctgccgttcacctcatgaagactatctgtatcaagaagagcttgaaaacgcccaaagcgaaggcatcattacgcttcataccgctttttctcgcatgccaaatcagccgaaaacatacgttcagcacgtaatggaacaagacggcaagaaattgattgaacttcttgatcaaggagcgcacttctatatttgcggagacggaagccaaatggcacctgccgttgaagcaacgcttatgaaaagctatgctgacgttcaccaagtgagtgaagcagacgctcgcttatggctgcagcagctagaagaaaaaggccgatacgcaaaagacgtgtgggctggg

SEQ ID NO: 92 - protein, 1049 aa, synthetic construct; identical to SEQ ID NO: 42
  REGION 1..1049: note = Variant of cytochrome P450

SEQ ID NO: 93 - DNA, 3147 bp, synthetic construct
  misc_feature 1..3147: note = Variant of cytochrome P450
  source 1..3147: mol_type = other DNA
atgacaattaaggaaatgcctcagcctaagacgtttggagaacttaaaaatttaccgttattaaacacagataaaccggttcaagctttgatgcgtattgcggatgaattaggagaaatctttaaattcgaggcgcctggtagcgtaacgcgctttttatcaagtcagcgtctaattaaagaagcatgcgatgaatcacgctttgataaaaacttaagtcaagcgcttaaatttgcacgtgattttcttggagacgggttatttacaagctggacgcatgaaccgaattggaaaaaagcgcataatatcttaggcccaagctttagtcagcgtgcaatgaaacgttatcatgcgatgatggtcgatatcgccgtgcagcttgttcaaaagtgggagcgtctaaatgcagatgagcatattgaagtatcggaagacatgacacgtttaacgcttgatacaattggtctttgcggctttaactatcgctttaacagcttttaccgagatcagcctcatccatttattgtgagtatggtccgtgcactggatgaagtaatgaacaagctgcagcgagcaaatccagacgacccagcttatgatgaaaacaagcgccagtgtcaagaagatatcaaggtgatgaacgactatgtagataaaattattgcagatcgcaaagcaaggggtgaacaaagccatgatttattaacgcagatgctaaacggaaaagatccagaaacgggtgagccgcttgatgacgggaacattcgttatcaaattattacattcttaattgcgggacacgaaacaacaagtggtcttttatcatttgcgctgtatttcttagtgaaaaatccacatgtattacaaaaagtagcagaagaagcagcacgagttctagtagatcctgttccaagctacaaacaagtcaaacagcttaaatatgtcggcatggtcttaaacgaagcgctgcgcttatggccaactgctcctctgttttcgctatatgcaaaagaagatacggtgcttggaggagaatatcctttaaccaaaggcgacgaagtaatggttctgattcctcagcttcaccgtgataaaacaatttggggagacgatgtggaggagttccgtccagagcgttttgaaaatccaagtgcgattccgcagcatgcgtttaaaccgtttggaaacggtcagcgtgcgtgtatcggtcagcagttcgctcttcatgaagcaacgctggtacttggtatgatgctaaaacactttgactttgaagatcatacaaactacgagctcgttattaaagaaactttaacgttaaaacctgaaggctttgtggtaaaagcaaaatcgaaaggcattccgcttggcggtattccttcacctagcactgaacagtctgctaaaaaagtacgcaaaaaggcagaaaacgctcataatacgccgctgcttgtgctatacggttcaaatgcgggaacagctgaaggaacggcgcgtgatttagcagatattgcaatgagcaaaggatttgcaccgcaggtcgcaacgcttgattcacacgccggaaatcttccgcgcgaaggagctgtattaattgtaacggcgtcttataacggtcatccgcctgataacgcaaagcaatttgtcgactggttagaccaagcgtctgctgatgaagtaaaaggcgttcgctactccgtatttggatgcggcgataaaaactgggctgcgacgtatcaaaaagtgcctgcttttatcgatgaaacgcttgccgctaaaggggcagaaaacatcgctgaccgcggtgaagcagatgcaagcgacgactttgaaggcacatatgaagaatggcgtgatcatatgtggagtgacgtagcagcctactttaacctcgacattgaaaacagtgaagataataaatctactctttcacttcaatttgtcgacagcgccgcggatatgccgcttgcgaaaatgcacggtgcgttttcaacgaacgtcgtagcaagcaaagaacttcaacagccaggcagtgcacgaagcacgcgacatcttgaaattgaacttccaaaagaagcttcttatcaagaaggagatcatttaggtgttattcctcgcaactatgaaggaatagtaaaccgtgtaacagcaaggttcggcctaagcgcatcacagcaaatccgtctggaagcagaagaagaaaaattagctcatttgccactcgctaaaacagtatccgtagaagagcttctgcaatacgtggagcttcaagatcctgttacgcgcacgcagcttcgcgcaatggctgctaaaacggtctgcccgccgcataaagtagagcttgaagccttgcttgaaaagcaagcctacaaagaacaagtgctggcaaaacgtttaacaatgcttgaactgcttgaaaaatacccggcgtgtgaaatgaaattcagcgaatttatcgcccttctgccaagcatacgcccgcgctattactcgatttcttcatcacctcgtgtcgatgaaaaacaagcaagcatcacggtcagcgttgtctcaggaccggcgtggagcggatatggagaatataaaggaattgcgtcgaactatcttgccgagctgcaagaaggagatacgattacgtgctttatttccacaccgcagtcagaatttacgctgccaaaagaccctgaaacgccgcttatcatggtcggaccgggaacaggcgtcgcgccgtttagaggctttgtgcaggcgcgcaaacagctaaaagaacaaggacagtcacttggagaagcacatttatacttcggctgccgttcacctcatgaagactatctgtatcaagaagagcttgaaaacgcccaaagcgaaggcatcattacgcttcataccgctttttctcgcatgccaaatcagccgaaaacatacgttcagcacgtaatggaacaagacggcaagaaattgattgaacttcttgatcaaggagcgcacttctatatttgcggagacggaagccaaatggcacctgccgttgaagcaacgcttatgaaaagctatgctgacgttcaccaagtgagtgaagcagacgctcgcttatggctgcagcagctagaagaaaaaggccgatacgcaaaagacgtgtgggctggg

SEQ ID NO: 94 - protein, 1049 aa, synthetic construct
  REGION 1..1049: note = Variant of cytochrome P450
MTIKEMPQPKTFGELKNLPLLNTDKPVQALMRIADELGEIFKFEAPGSVTRFLSSQRLIKEACDESRFDKNLSQALKFARDFLGDGLFTSWTHEPNWKKAHNILGPSFSQRAMKRYHAMMVDIAVQLVQKWERLNADEHIEVSEDMTRLTLDTIGLCGFNYRFNSFYRDQPHPFIVSMVRALDEVMNKLQRANPDDPAYDENKRQCQEDIKVMNDYVDKIIADRKARGEQSHDLLTQMLNGKDPETGEPLDDGNIRYQIITFLIAGHETTSGLLSFALYFLVKNPHVLQKVAEEAARVLVDPVPSYKQVKQLKYVGMVLNEALRLWPTAPLFSLYAKEDTVLGGEYPLTKGDEVMVLIPQLHRDKTIWGDDVEEFRPERFENPSAIPQHAFKPFGNGQRACIGQQFALHEATLVLGMMLKHFDFEDHTNYELVIKETLTLKPEGFVVKAKSKGIPLGGIPSPSTEQSAKKVRKKAENAHNTPLLVLYGSNAGTAEGTARDLADIAMSKGFAPQVATLDSHAGNLPREGAVLIVTASYNGHPPDNAKQFVDWLDQASADEVKGVRYSVFGCGDKNWAATYQKVPAFIDETLAAKGAENIADRGEADASDDFEGTYEEWRDHMWSDVAAYFNLDIENSEDNKSTLSLQFVDSAADMPLAKMHGAFSTNVVASKELQQPGSARSTRHLEIELPKEASYQEGDHLGVIPRNYEGIVNRVTARFGLSASQQIRLEAEEEKLAHLPLAKTVSVEELLQYVELQDPVTRTQLRAMAAKTVCPPHKVELEALLEKQAYKEQVLAKRLTMLELLEKYPACEMKFSEFIALLPSIRPRYYSISSSPRVDEKQASITVSVVSGPAWSGYGEYKGIASNYLAELQEGDTITCFISTPQSEFTLPKDPETPLIMVGPGTGVAPFRGFVQARKQLKEQGQSLGEAHLYFGCRSPHEDYLYQEELENAQSEGIITLHTAFSRMPNQPKTYVQHVMEQDGKKLIELLDQGAHFYICGDGSQMAPAVEATLMKSYADVHQVSEADARLWLQQLEEKGRYAKDVWAG

SEQ ID NO: 95 - DNA, 3147 bp, synthetic construct
  misc_feature 1..3147: note = Variant of cytochrome P450
  source 1..3147: mol_type = other DNA
atgacaattaaggaaatgcctcagcctaagacgtttggagaacttaaaaatttaccgttattaaacacagataaaccggttcaagctttgatgcgtattgcggatgaattaggagaaatctttaaattcgaggcgcctggtagcgtaacgcgctttttatcaagtcagcgtctaattaaagaagcatgcgatgaatcacgctttgataaaaacttaagtcaaggccttaaatttgcacgtgattttcttggagacgggttatttacaagctggacgcatgaaccgaattggaaaaaagcgcataatatcttaggcccaagctttagtcagcgtgcaatgaaacgttatcatgcgatgatggtcgatatcgccgtgcagcttgttcaaaagtgggagcgtctaaatgcagatgagcatattgaagtatcggaagacatgacacgtttaacgctggatacaattggtctttgcggcttcaactatcgctttaacagcttttaccgagatcagcctcatccatttattgtgagtatggtgcgtgcactggatgaagtaatgaacaagctgcagcgagcaaatccagacgacccagcttatgatgaaaacaagcgccagtgtcaagaagatatcaaggtgatgaacgactatgtcgataaaattattgcagatcgcaaagcaaggggtgaacaaagccatgatttattaacgcagatgctaaacggaaaagatccagaaacgggtgagccgcttgatgacgggaacattcgttatcaaattattacattcttaattgcgggacacgaaacaacaagtggtcttttatcatttgcgctgtatttcttagtgaaaaatccacatgtattacaaaaagtagcagaagaagcagcacgagttctagtagatcctgttccaagctacaaacaagtcaaacagcttaaatatgtcggcatggtcttaaacgaagcgctgcgcttatggccaactgctcctgcgttttccctatatgcaaaagaagatacggtgcttggaggagaatatcctttaaccaaaggcgacgaagtaatggttctgattcctcagcttcaccgtgataaaacaatttggggagacgatgtggaggagttccgtccagagcgttttgaaaatccaagtgcgattccgcagcatgcgtttaaaccgtttggaaacggtcagcgtgcgtgtatcggtcagcagttcgctcttcatgaagcaacgctggtacttggtatgatgctaaaacactttgactttgaagatcatacaaactacgagctcgttattaaagaaaagttaacgttaaaacctgaaggctttgtggtaaaagcaaaatcgaaaggcattccgcttggcggtattccttcacctagcactgaacagtctgctaaaaaagtacgcaaaaaggcagaaaacgctcataatacgccgctgcttgtgctatacggttcaaatgcgggaacagctgaaggaacggcgcgtgatttagcagatattgcaatgagcaaaggatttgcaccgcaggtcgcaacgcttgattcacacgccggaaatcttccgcgcgaaggagctgtattaattgtaacggcgtcttataacggtcatccgcctgataacgcaaagcaatttgtcgactggttagaccaagcgtctgctgatgaagtaaaaggcgttcgctactccgtatttggatgcggcgataaaaactgggctgcgacgtatcaaaaagtgcctgcttttatcgatgaaacgcttgccgctaaaggggcagaaaacatcgctgaccgcggtgaagcagatgcaagcgacgactttgaaggcacatatgaagaatggcgtgatcatatgtggagtgacgtagcagcctactttaacctcgacattgaaaacagtgaagataataaatctactctttcacttcaatttgtcgacagcgccgcggatatgccgcttgcgaaaatgcacggtgcgttttcaacgaacgtcgtagcaagcaaagaacttcaacagccaggcagtgcacgaagcacgcgacatcttgaaattgaacttccaaaagaagcttcttatcaagaaggagatcatttaggtgttattcctcgcaactatgaaggaatagtaaaccgtgtaacagcaaggttcggcctaagcgcatcacagcaaatccgtctggaagcagaagaagaaaaattagctcatttgccactcgctaaaacagtatccgtagaagagcttctgcaatacgtggagcttcaagatcctgttacgcgcacgcagcttcgcgcaatggctgctaaaacggtctgcccgccgcataaagtagagcttgaagccttgcttgaaaagcaagcctacaaagaacaagtgctggcaaaacgtttaacaatgcttgaactgcttgaaaaatacccggcgtgtgaaatgaaattcagcgaatttatcgcccttctgccaagcatacgcccgcgctattactcgatttcttcatcacctcgtgtcgatgaaaaacaagcaagcatcacggtcagcgttgtctcaggaccggcgtggagcggatatggagaatataaaggaattgcgtcgaactatcttgccgagctgcaagaaggagatacgattacgtgctttatttccacaccgcagtcagaatttacgctgccaaaagaccctgaaacgccgcttatcatggtcggaccgggaacaggcgtcgcgccgtttagaggctttgtgcaggcgcgcaaacagctaaaagaacaaggacagtcacttggagaagcacatttatacttcggctgccgttcacctcatgaagactatctgtatcaagaagagcttgaaaacgcccaaagcgaaggcatcattacgcttcataccgctttttctcgcatgccaaatcagccgaaaacatacgttcagcacgtaatggaacaagacggcaagaaattgattgaacttcttgatcaaggagcgcacttctatatttgcggagacggaagccaaatggcacctgccgttgaagcaacgcttatgaaaagctatgctgacgttcaccaagtgagtgaagcagacgctcgcttatggctgcagcagctagaagaaaaaggccgatacgcaaaagacgtgtgggctggg

SEQ ID NO: 96 - protein, 1049 aa, synthetic construct
  REGION 1..1049: note = Variant of cytochrome P450
MTIKEMPQPKTFGELKNLPLLNTDKPVQALMRIADELGEIFKFEAPGSVTRFLSSQRLIKEACDESRFDKNLSQGLKFARDFLGDGLFTSWTHEPNWKKAHNILGPSFSQRAMKRYHAMMVDIAVQLVQKWERLNADEHIEVSEDMTRLTLDTIGLCGFNYRFNSFYRDQPHPFIVSMVRALDEVMNKLQRANPDDPAYDENKRQCQEDIKVMNDYVDKIIADRKARGEQSHDLLTQMLNGKDPETGEPLDDGNIRYQIITFLIAGHETTSGLLSFALYFLVKNPHVLQKVAEEAARVLVDPVPSYKQVKQLKYVGMVLNEALRLWPTAPAFSLYAKEDTVLGGEYPLTKGDEVMVLIPQLHRDKTIWGDDVEEFRPERFENPSAIPQHAFKPFGNGQRACIGQQFALHEATLVLGMMLKHFDFEDHTNYELVIKEKLTLKPEGFVVKAKSKGIPLGGIPSPSTEQSAKKVRKKAENAHNTPLLVLYGSNAGTAEGTARDLADIAMSKGFAPQVATLDSHAGNLPREGAVLIVTASYNGHPPDNAKQFVDWLDQASADEVKGVRYSVFGCGDKNWAATYQKVPAFIDETLAAKGAENIADRGEADASDDFEGTYEEWRDHMWSDVAAYFNLDIENSEDNKSTLSLQFVDSAADMPLAKMHGAFSTNVVASKELQQPGSARSTRHLEIELPKEASYQEGDHLGVIPRNYEGIVNRVTARFGLSASQQIRLEAEEEKLAHLPLAKTVSVEELLQYVELQDPVTRTQLRAMAAKTVCPPHKVELEALLEKQAYKEQVLAKRLTMLELLEKYPACEMKFSEFIALLPSIRPRYYSISSSPRVDEKQASITVSVVSGPAWSGYGEYKGIASNYLAELQEGDTITCFISTPQSEFTLPKDPETPLIMVGPGTGVAPFRGFVQARKQLKEQGQSLGEAHLYFGCRSPHEDYLYQEELENAQSEGIITLHTAFSRMPNQPKTYVQHVMEQDGKKLIELLDQGAHFYICGDGSQMAPAVEATLMKSYADVHQVSEADARLWLQQLEEKGRYAKDVWAG

SEQ ID NO: 97 - DNA, 3147 bp, synthetic construct
  misc_feature 1..3147: note = Variant of cytochrome P450
  source 1..3147: mol_type = other DNA
atgacaattaaggaaatgcctcagcctaagacgtttggagaacttaaaaatttaccgttattaaacacagataaaccggttcaagctttgatgcgtattgcggatgaattaggagaaatctttaaattcgaggcgcctggtagcgtaacgcgctttttatcaagtcagcgtctaattaaagaagcatgcgatgaatcacgctttgataaaaacttaagtcaagcgcttaaatttgcacgtgattttcttggagacgggttatttacaagctggacgcatgaaccgaattggaaaaaagcgcataatatcttaggcccaagctttagtcagcgtgcaatgaaacgttatcatgcgatgatggtcgatatcgccgtgcagcttgttcaaaagtgggagcgtctaaatgcagatgagcatattgaagtatcggaagacatgacacgtttaacgcttgatacaattggtctttgcggctttaactatcgctttaacagcttttaccgagatcagcctcatccatttattgtgagtatggtccgtgcactggatgaagtaatgaacaagctgcagcgagcaaatccagacgacccagcttatgatgaaaacaagcgccagtgtcaagaagatatcaaggtgatgaacgactatgtagataaaattattgcagatcgcaaagcaaggggtgaacaaagccatgatttattaacgcagatgctaaacggaaaagatccagaaacgggtgagccgcttgatgacgggaacattcgttatcaaattattacattcttaattgcgggacacgaaacaacaagtggtcttttatcatttgcgctgtatttcttagtgaaaaatccacatgtattacaaaaagtagcagaagaagcagcacgagttctagtagatcctgttccaagctacaaacaagtcaaacagcttaaatatgtcggcatggtcttaaacgaagcgctgcgcttatggccaactgctcctgtgttttcgctatatgcaaaagaagatacggtgcttggaggagaatatcctttaaccaaaggcgacgaagtaatggttctgattcctcagcttcaccgtgataaaacaatttggggagacgatgtggaggagttccgtccagagcgttttgaaaatccaagtgcgattccgcagcatgcgtttaaaccgtttggaaacggtcagcgtgcgtgtatcggtcagcagttcgctcttcatgaagcaacgctggtacttggtatgatgctaaaacactttgactttgaagatcatacaaactacgagctcgttattaaagaaactttaacgttaaaacctgaaggctttgtggtaaaagcaaaatcgaaaggcattccgcttggcggtattccttcacctagcactgaacagtctgctaaaaaagtacgcaaaaaggcagaaaacgctcataatacgccgctgcttgtgctatacggttcaaatgcgggaacagctgaaggaacggcgcgtgatttagcagatattgcaatgagcaaaggatttgcaccgcaggtcgcaacgcttgattcacacgccggaaatcttccgcgcgaaggagctgtattaattgtaacggcgtcttataacggtcatccgcctgataacgcaaagcaatttgtcgactggttagaccaagcgtctgctgatgaagtaaaaggcgttcgctactccgtatttggatgcggcgataaaaactgggctgcgacgtatcaaaaagtgcctgcttttatcgatgaaacgcttgccgctaaaggggcagaaaacatcgctgaccgcggtgaagcagatgcaagcgacgactttgaaggcacatatgaagaatggcgtgatcatatgtggagtgacgtagcagcctactttaacctcgacattgaaaacagtgaagataataaatctactctttcacttcaatttgtcgacagcgccgcggatatgccgcttgcgaaaatgcacggtgcgttttcaacgaacgtcgtagcaagcaaagaacttcaacagccaggcagtgcacgaagcacgcgacatcttgaaattgaacttccaaaagaagcttcttatcaagaaggagatcatttaggtgttattcctcgcaactatgaaggaatagtaaaccgtgtaacagcaaggttcggcctaagcgcatcacagcaaatccgtctggaagcagaagaagaaaaattagctcatttgccactcgctaaaacagtatccgtagaagagcttctgcaatacgtggagcttcaagatcctgttacgcgcacgcagcttcgcgcaatggctgctaaaacggtctgcccgccgcataaagtagagcttgaagccttgcttgaaaagcaagcctacaaagaacaagtgctggcaaaacgtttaacaatgcttgaactgcttgaaaaatacccggcgtgtgaaatgaaattcagcgaatttatcgcccttctgccaagcatacgcccgcgctattactcgatttcttcatcacctcgtgtcgatgaaaaacaagcaagcatcacggtcagcgttgtctcaggaccggcgtggagcggatatggagaatataaaggaattgcgtcgaactatcttgccgagctgcaagaaggagatacgattacgtgctttatttccacaccgcagtcagaatttacgctgccaaaagaccctgaaacgccgcttatcatggtcggaccgggaacaggcgtcgcgccgtttagaggctttgtgcaggcgcgcaaacagctaaaagaacaaggacagtcacttggagaagcacatttatacttcggctgccgttcacctcatgaagactatctgtatcaagaagagcttgaaaacgcccaaagcgaaggcatcattacgcttcataccgctttttctcgcatgccaaatcagccgaaaacatacgttcagcacgtaatggaacaagacggcaagaaattgattgaacttcttgatcaaggagcgcacttctatatttgcggagacggaagccaaatggcacctgccgttgaagcaacgcttatgaaaagctatgctgacgttcaccaagtgagtgaagcagacgctcgcttatggctgcagcagctagaagaaaaaggccgatacgcaaaagacgtgtgggctggg

SEQ ID NO: 98 - protein, 1049 aa, synthetic construct
  REGION 1..1049: note = Variant of cytochrome P450
MTIKEMPQPKTFGELKNLPLLNTDKPVQALMRIADELGEIFKFEAPGSVTRFLSSQRLIKEACDESRFDKNLSQALKFARDFLGDGLFTSWTHEPNWKKAHNILGPSFSQRAMKRYHAMMVDIAVQLVQKWERLNADEHIEVSEDMTRLTLDTIGLCGFNYRFNSFYRDQPHPFIVSMVRALDEVMNKLQRANPDDPAYDENKRQCQEDIKVMNDYVDKIIADRKARGEQSHDLLTQMLNGKDPETGEPLDDGNIRYQIITFLIAGHETTSGLLSFALYFLVKNPHVLQKVAEEAARVLVDPVPSYKQVKQLKYVGMVLNEALRLWPTAPVFSLYAKEDTVLGGEYPLTKGDEVMVLIPQLHRDKTIWGDDVEEFRPERFENPSAIPQHAFKPFGNGQRACIGQQFALHEATLVLGMMLKHFDFEDHTNYELVIKETLTLKPEGFVVKAKSKGIPLGGIPSPSTEQSAKKVRKKAENAHNTPLLVLYGSNAGTAEGTARDLADIAMSKGFAPQVATLDSHAGNLPREGAVLIVTASYNGHPPDNAKQFVDWLDQASADEVKGVRYSVFGCGDKNWAATYQKVPAFIDETLAAKGAENIADRGEADASDDFEGTYEEWRDHMWSDVAAYFNLDIENSEDNKSTLSLQFVDSAADMPLAKMHGAFSTNVVASKELQQPGSARSTRHLEIELPKEASYQEGDHLGVIPRNYEGIVNRVTARFGLSASQQIRLEAEEEKLAHLPLAKTVSVEELLQYVELQDPVTRTQLRAMAAKTVCPPHKVELEALLEKQAYKEQVLAKRLTMLELLEKYPACEMKFSEFIALLPSIRPRYYSISSSPRVDEKQASITVSVVSGPAWSGYGEYKGIASNYLAELQEGDTITCFISTPQSEFTLPKDPETPLIMVGPGTGVAPFRGFVQARKQLKEQGQSLGEAHLYFGCRSPHEDYLYQEELENAQSEGIITLHTAFSRMPNQPKTYVQHVMEQDGKKLIELLDQGAHFYICGDGSQMAPAVEATLMKSYADVHQVSEADARLWLQQLEEKGRYAKDVWAG

SEQ ID NO: 99 - DNA, 3147 bp, synthetic construct
  misc_feature 1..3147: note = Variant of cytochrome P450
  source 1..3147: mol_type = other DNA
atgacaattaaggaaatgcctcagcctaagacgtttggagaacttaaaaatttaccgttattaaacacagataaaccggttcaagctttgatgcgtattgcggatgaattaggagaaatctttaaattcgaggcgcctggtagcgtaacgcgctttttatcaagtcagcgtctaattaaagaagcatgcgatgaatcacgctttgataaaaacttaagtcaaggccttaaatttgcacgtgattttcttggagacgggttatttacaagctggacgcatgaaccgaattggaaaaaagcgcataatatcttaggcccaagctttagtcagcgtgcaatgaaacgttatcatgcgatgatggtcgatatcgccgtgcagcttgttcaaaagtgggagcgtctaaatgcagatgagcatattgaagtatcggaagacatgacacgtttaacgcttgatacaattggtctttgcggcttcaactatcgctttaacagcttttaccgagatcagcctcatccatttattgtgagtatggtccgtgcactggatgaagtaatgaacaagctgcagcgagcaaatccagacgacccagcttatgatgaaaacaagcgccagtgtcaagaagatatcaaggtgatgaacgactatgtagataaaattattgcagatcgcaaagcaaggggtgaacaaagccatgatttattaacgcagatgctaaacggaaaagatccagaaacgggtgagccgcttgatgacgggaacattcgttatcaaattattacattcttaattgcgggacacgaaacaacaagtggtcttttatcatttgcgctgtatttcttagtgaaaaatccacatgtattacaaaaagtagcagaagaagcagcacgagttctagtagatcctgttccaagctacaaacaagtcaaacagcttaaatatgtcggcatggtcttaaacgaagcgctgcgcttatggccaactgctcctgcgttttccctatatgcaaaagaagatacggtgcttggaggagaatatcctttaaccaaaggcgacgaagtaatggttctgattcctcagcttcaccgtgataaaacaatttggggagacgatgtggaggagttccgtccagagcgttttgaaaatccaagtgcgattccgcagcatgcgtttaaaccgtttggaaacggtcagcgtgcgtgtatcggtcagcagttcgctcttcatgaagcaacgctggtacttggtatgatgctaaaacactttgactttgaagatcatacaaactacgagctcgttattaaagaaactttaacgttaaaacctgaaggctttgtggtaaaagcaaaatcgaaaggcattccgcttggcggtattccttcacctagcactgaacagtctgctaaaaaagtacgcaaaaaggcagaaaacgctcataatacgccgctgcttgtgctatacggttcaaatgcgggaacagctgaaggaacggcgcgtgatttagcagatattgcaatgagcaaaggatttgcaccgcaggtcgcaacgcttgattcacacgccggaaatcttccgcgcgaaggagctgtattaattgtaacggcgtcttataacggtcatccgcctgataacgcaaagcaatttgtcgactggttagaccaagcgtctgctgatgaagtaaaaggcgttcgctactccgtatttggatgcggcgataaaaactgggctgcgacgtatcaaaaagtgcctgcttttatcgatgaaacgcttgccgctaaaggggcagaaaacatcgctgaccgcggtgaagcagatgcaagcgacgactttgaaggcacatatgaagaatggcgtgatcatatgtggagtgacgtagcagcctactttaacctcgacattgaaaacagtgaagataataaatctactctttcacttcaatttgtcgacagcgccgcggatatgccgcttgcgaaaatgcacggtgcgttttcaacgaacgtcgtagcaagcaaagaacttcaacagccaggcagtgcacgaagcacgcgacatcttgaaattgaacttccaaaagaagcttcttatcaagaaggagatcatttaggtgttattcctcgcaactatgaaggaatagtaaaccgtgtaacagcaaggttcggcctaagcgcatcacagcaaatccgtctggaagcagaagaagaaaaattagctcatttgccactcgctaaaacagtatccgtagaagagcttctgcaatacgtggagcttcaagatcctgttacgcgcacgcagcttcgcgcaatggctgctaaaacggtctgcccgccgcataaagtagagcttgaagccttgcttgaaaagcaagcctacaaagaacaagtgctggcaaaacgtttaacaatgcttgaactgcttgaaaaatacccggcgtgtgaaatgaaattcagcgaatttatcgcccttctgccaagcatacgcccgcgctattactcgatttcttcatcacctcgtgtcgatgaaaaacaagcaagcatcacggtcagcgttgtctcaggaccggcgtggagcggatatggagaatataaaggaattgcgtcgaactatcttgccgagctgcaagaaggagatacgattacgtgctttatttccacaccgcagtcagaatttacgctgccaaaagaccctgaaacgccgcttatcatggtcggaccgggaacaggcgtcgcgccgtttagaggctttgtgcaggcgcgcaaacagctaaaagaacaaggacagtcacttggagaagcacatttatacttcggctgccgttcacctcatgaagactatctgtatcaagaagagcttgaaaacgcccaaagcgaaggcatcattacgcttcataccgctttttctcgcatgccaaatcagccgaaaacatacgttcagcacgtaatggaacaagacggcaagaaattgattgaacttcttgatcaaggagcgcacttctatatttgcggagacggaagccaaatggcacctgccgttgaagcaacgcttatgaaaagctatgctgacgttcaccaagtgagtgaagcagacgctcgcttatggctgcagcagctagaagaaaaaggccgatacgcaaaagacgtgtgggctggg

SEQ ID NO: 100 - protein, 1049 aa, synthetic construct
  REGION 1..1049: note = Variant of cytochrome P450
MTIKEMPQPKTFGELKNLPLLNTDKPVQALMRIADELGEIFKFEAPGSVTRFLSSQRLIKEACDESRFDKNLSQGLKFARDFLGDGLFTSWTHEPNWKKAHNILGPSFSQRAMKRYHAMMVDIAVQLVQKWERLNADEHIEVSEDMTRLTLDTIGLCGFNYRFNSFYRDQPHPFIVSMVRALDEVMNKLQRANPDDPAYDENKRQCQEDIKVMNDYVDKIIADRKARGEQSHDLLTQMLNGKDPETGEPLDDGNIRYQIITFLIAGHETTSGLLSFALYFLVKNPHVLQKVAEEAARVLVDPVPSYKQVKQLKYVGMVLNEALRLWPTAPAFSLYAKEDTVLGGEYPLTKGDEVMVLIPQLHRDKTIWGDDVEEFRPERFENPSAIPQHAFKPFGNGQRACIGQQFALHEATLVLGMMLKHFDFEDHTNYELVIKETLTLKPEGFVVKAKSKGIPLGGIPSPSTEQSAKKVRKKAENAHNTPLLVLYGSNAGTAEGTARDLADIAMSKGFAPQVATLDSHAGNLPREGAVLIVTASYNGHPPDNAKQFVDWLDQASADEVKGVRYSVFGCGDKNWAATYQKVPAFIDETLAAKGAENIADRGEADASDDFEGTYEEWRDHMWSDVAAYFNLDIENSEDNKSTLSLQFVDSAADMPLAKMHGAFSTNVVASKELQQPGSARSTRHLEIELPKEASYQEGDHLGVIPRNYEGIVNRVTARFGLSASQQIRLEAEEEKLAHLPLAKTVSVEELLQYVELQDPVTRTQLRAMAAKTVCPPHKVELEALLEKQAYKEQVLAKRLTMLELLEKYPACEMKFSEFIALLPSIRPRYYSISSSPRVDEKQASITVSVVSGPAWSGYGEYKGIASNYLAELQEGDTITCFISTPQSEFTLPKDPETPLIMVGPGTGVAPFRGFVQARKQLKEQGQSLGEAHLYFGCRSPHEDYLYQEELENAQSEGIITLHTAFSRMPNQPKTYVQHVMEQDGKKLIELLDQGAHFYICGDGSQMAPAVEATLMKSYADVHQVSEADARLWLQQLEEKGRYAKDVWAG

SEQ ID NO: 101 - DNA, 3147 bp, synthetic construct
  misc_feature 1..3147: note = Variant of cytochrome P450
  source 1..3147: mol_type = other DNA
atgacaattaaggaaatgcctcagcctaagacgtttggagaacttaaaaatttaccgttattaaacacagataaaccggttcaagctttgatgcgtattgcggatgaattaggagaaatctttaaattcgaggcgcctggtagcgtaacgcgctttttatcaagtcagcgtctaattaaagaagcatgcgatgaatcacgctttgataaaaacttaagtcaagcccttaaatttgcacgtgattttcttggagacgggttatttacaagctggacgcatgaaccgaattggaaaaaagcgcataatatcttaggcccaagctttagtcagcgtgcaatgaaacgttatcatgcgatgatggtcgatatcgccgtgcagcttgttcaaaagtgggagcgtctaaatgcagatgagcatattgaagtatcggaagacatgacacgtttaacgcttgatacaattggtctttgcggctttaactatcgctttaacagcttttaccgagatcagcctcatccatttattgtgagtatggtccgtgcactggatgaagtaatgaacaagctgcagcgagcaaatccagacgacccagcttatgatgaaaacaagcgccagtgtcaagaagatatcaaggtgatgaacgactatgtagataaaattattgcagatcgcaaagcaaggggtgaacaaagccatgatttattaacgcagatgctaaacggaaaagatccagaaacgggtgagccgcttgatgacgggaacattcgttatcaaattattacattcttaattgcgggacacgaaacaacaagtggtcttttatcatttgcgctgtatttcttagtgaaaaatccacatgtattacaaaaagtagcagaagaagcagcacgagttctagtagatcctgttccaagctacaaacaagtcaaacagcttaaatatgtcggcatggtcttaaacgaagcgctgcgcttatggccaactgctccagcgttttcgctatatgcaaaagaagatacggtgcttggaggagaatatcctttaaccaaaggcgacgaagtaatggttctgattcctcagcttcaccgtgataaaacaatttggggagacgatgtggaggagttccgtccagagcgttttgaaaatccaagtgcgattccgcagcatgcgtttaaaccgtttggaaacggtcagcgtgcgtgtatcggtcagcagttcgctcttcatgaagcaacgctggtacttggtatgatgctaaaacactttgactttgaagatcatacaaactacgagctcgttattaaagaaaagttaacgttaaaacctgaaggctttgtggtaaaagcaaaatcgaaaggcattccgcttggcggtattccttcacctagcactgaacagtctgctaaaaaagtacgcaaaaaggcagaaaacgctcataatacgccgctgcttgtgctatacggttcaaatgcgggaacagctgaaggaacggcgcgtgatttagcagatattgcaatgagcaaaggatttgcaccgcaggtcgcaacgcttgattcacacgccggaaatcttccgcgcgaaggagctgtattaattgtaacggcgtcttataacggtcatccgcctgataacgcaaagcaatttgtcgactggttagaccaagcgtctgctgatgaagtaaaaggcgttcgctactccgtatttggatgcggcgataaaaactgggctgcgacgtatcaaaaagtgcctgcttttatcgatgaaacgcttgccgctaaaggggcagaaaacatcgctgaccgcggtgaagcagatgcaagcgacgactttgaaggcacatatgaagaatggcgtgatcatatgtggagtgacgtagcagcctactttaacctcgacattgaaaacagtgaagataataaatctactctttcacttcaatttgtcgacagcgccgcggatatgccgcttgcgaaaatgcacggtgcgttttcaacgaacgtcgtagcaagcaaagaacttcaacagccaggcagtgcacgaagcacgcgacatcttgaaattgaacttccaaaagaagcttcttatcaagaaggagatcatttaggtgttattcctcgcaactatgaaggaatagtaaaccgtgtaacagcaaggttcggcctaagcgcatcacagcaaatccgtctggaagcagaagaagaaaaattagctcatttgccactcgctaaaacagtatccgtagaagagcttctgcaatacgtggagcttcaagatcctgttacgcgcacgcagcttcgcgcaatggctgctaaaacggtctgcccgccgcataaagtagagcttgaagccttgcttgaaaagcaagcctacaaagaacaagtgctggcaaaacgtttaacaatgcttgaactgcttgaaaaatacccggcgtgtgaaatgaaattcagcgaatttatcgcccttctgccaagcatacgcccgcgctattactcgatttcttcatcacctcgtgtcgatgaaaaacaagcaagcatcacggtcagcgttgtctcaggaccggcgtggagcggatatggagaatataaaggaattgcgtcgaactatcttgccgagctgcaagaaggagatacgattacgtgctttatttccacaccgcagtcagaatttacgctgccaaaagaccctgaaacgccgcttatcatggtcggaccgggaacaggcgtcgcgccgtttagaggctttgtgcaggcgcgcaaacagctaaaagaacaaggacagtcacttggagaagcacatttatacttcggctgccgttcacctcatgaagactatctgtatcaagaagagcttgaaaacgcccaaagcgaaggcatcattacgcttcataccgctttttctcgcatgccaaatcagccgaaaacatacgttcagcacgtaatggaacaagacggcaagaaattgattgaacttcttgatcaaggagcgcacttctatatttgcggagacggaagccaaatggcacctgccgttgaagcaacgcttatgaaaagctatgctgacgttcaccaagtgagtgaagcagacgctcgcttatggctgcagcagctagaagaaaaaggccgatacgcaaaagacgtgtgggctggg

SEQ ID NO: 102 - protein, 1049 aa, synthetic construct
  REGION 1..1049: note = Variant of cytochrome P450
MTIKEMPQPKTFGELKNLPLLNTDKPVQALMRIADELGEIFKFEAPGSVTRFLSSQRLIKEACDESRFDKNLSQALKFARDFLGDGLFTSWTHEPNWKKAHNILGPSFSQRAMKRYHAMMVDIAVQLVQKWERLNADEHIEVSEDMTRLTLDTIGLCGFNYRFNSFYRDQPHPFIVSMVRALDEVMNKLQRANPDDPAYDENKRQCQEDIKVMNDYVDKIIADRKARGEQSHDLLTQMLNGKDPETGEPLDDGNIRYQIITFLIAGHETTSGLLSFALYFLVKNPHVLQKVAEEAARVLVDPVPSYKQVKQLKYVGMVLNEALRLWPTAPAFSLYAKEDTVLGGEYPLTKGDEVMVLIPQLHRDKTIWGDDVEEFRPERFENPSAIPQHAFKPFGNGQRACIGQQFALHEATLVLGMMLKHFDFEDHTNYELVIKEKLTLKPEGFVVKAKSKGIPLGGIPSPSTEQSAKKVRKKAENAHNTPLLVLYGSNAGTAEGTARDLADIAMSKGFAPQVATLDSHAGNLPREGAVLIVTASYNGHPPDNAKQFVDWLDQASADEVKGVRYSVFGCGDKNWAATYQKVPAFIDETLAAKGAENIADRGEADASDDFEGTYEEWRDHMWSDVAAYFNLDIENSEDNKSTLSLQFVDSAADMPLAKMHGAFSTNVVASKELQQPGSARSTRHLEIELPKEASYQEGDHLGVIPRNYEGIVNRVTARFGLSASQQIRLEAEEEKLAHLPLAKTVSVEELLQYVELQDPVTRTQLRAMAAKTVCPPHKVELEALLEKQAYKEQVLAKRLTMLELLEKYPACEMKFSEFIALLPSIRPRYYSISSSPRVDEKQASITVSVVSGPAWSGYGEYKGIASNYLAELQEGDTITCFISTPQSEFTLPKDPETPLIMVGPGTGVAPFRGFVQARKQLKEQGQSLGEAHLYFGCRSPHEDYLYQEELENAQSEGIITLHTAFSRMPNQPKTYVQHVMEQDGKKLIELLDQGAHFYICGDGSQMAPAVEATLMKSYADVHQVSEADARLWLQQLEEKGRYAKDVWAG

SEQ ID NO: 103 - DNA, 3147 bp, synthetic construct
  misc_feature 1..3147: note = Variant of cytochrome P450
  source 1..3147: mol_type = other DNA
atgacaattaaggaaatgcctcagcctaagacgtttggagaacttaaaaatttaccgttattaaacacagataaaccggttcaagctttgatgcgtattgcggatgaattaggagaaatctttaaattcgaggcgcctggtagcgtaacgcgctttttatcaagtcagcgtctaattaaagaagcatgcgatgaatcacgctttgataaaaacttaagtcaagcgcttaaatttgcacgtgattttcttggagacgggttatttacaagctggacgcatgaaccgaattggaaaaaagcgcataatatcttaggcccaagctttagtcagcgtgcaatgaaacgttatcatgcgatgatggtcgatatcgccgtgcagcttgttcaaaagtgggagcgtctaaatgcagatgagcatattgaagtatcggaagacatgcgtcgtttaacgcttgatacaatgggtctttgcggctttaactatcgctttaacagcttttaccgagatcagcctcatccatttattgtgagtatggtccgtgcactggatgaagtaatgaacaagctgcagcgagcaaatccagacgacccagcttatgatgaaaacaagcgccagtgtcaagaagatatcaaggtgatgaacgactatgtagataaaattattgcagatcgcaaagcaaggggtgaacaaagccatgatttattaacgcagatgctaaacggaaaagatccagaaacgggtgagccgcttgatgacgggaacattcgttatcaaattattacattcttaattgcgggacacgaaacaacaagtggtcttttatcatttgcgctgtatttcttagtgaaaaatccacatgtattacaaaaagtagcagaagaagcagcacgagttctagtagatcctgttccaagctacaaacaagtcaaacagcttaaatatgtcggcatggtcttaaacgaagcgctgcgcttatggccaactgctcctgcgttttccctatatgcaaaagaagatacggtgcttggaggagaatatcctttaaccaaaggcgacgaagtaatggttctgattcctcagcttcaccgtgataaaacaatttggggagacgatgtggaggagttccgtccagagcgttttgaaaatccaagtgcgattccgcagcatgcgtttaaaccgtttggaaacggtcagcgtgcgtgtatcggtcagcagttcgctcttcatgaagcaacgctggtacttggtatgatgctaaaacactttgactttgaagatcatacaaactacgagctcgttattaaagaaactttaacgttaaaacctgaaggctttgtggtaaaagcaaaatcgaaaggcattccgcttggcggtattccttcacctagcactgaacagtctgctaaaaaagtacgcaaaaaggcagaaaacgctcataatacgccgctgcttgtgctatacggttcaaatgcgggaacagctgaaggaacggcgcgtgatttagcagatattgcaatgagcaaaggatttgcaccgcaggtcgcaacgcttgattcacacgccggaaatcttccgcgcgaaggagctgtattaattgtaacggcgtcttataacggtcatccgcctgataacgcaaagcaatttgtcgactggttagaccaagcgtctgctgatgaagtaaaaggcgttcgctactccgtatttggatgcggcgataaaaactgggctgcgacgtatcaaaaagtgcctgcttttatcgatgaaacgcttgccgctaaaggggcagaaaacatcgctgaccgcggtgaagcagatgcaagcgacgactttgaaggcacatatgaagaatggcgtgatcatatgtggagtgacgtagcagcctactttaacctcgacattgaaaacagtgaagataataaatctactctttcacttcaatttgtcgacagcgccgcggatatgccgcttgcgaaaatgcacggtgcgttttcaacgaacgtcgtagcaagcaaagaacttcaacagccaggcagtgcacgaagcacgcgacatcttgaaattgaacttccaaaagaagcttcttatcaagaaggagatcatttaggtgttattcctcgcaactatgaaggaatagtaaaccgtgtaacagcaaggttcggcctaagcgcatcacagcaaatccgtctggaagcagaagaagaaaaattagctcatttgccactcgctaaaacagtatccgtagaagagcttctgcaatacgtggagcttcaagatcctgttacgcgcacgcagcttcgcgcaatggctgctaaaacggtctgcccgccgcataaagtagagcttgaagccttgcttgaaaagcaagcctacaaagaacaagtgctggcaaaacgtttaacaatgcttgaactgcttgaaaaatacccggcgtgtgaaatgaaattcagcgaatttatcgcccttctgccaagcatacgcccgcgctattactcgatttcttcatcacctcgtgtcgatgaaaaacaagcaagcatcacggtcagcgttgtctcaggaccggcgtggagcggatatggagaatataaaggaattgcgtcgaactatcttgccgagctgcaagaaggagatacgattacgtgctttatttccacaccgcagtcagaatttacgctgccaaaagaccctgaaacgccgcttatcatggtcggaccgggaacaggcgtcgcgccgtttagaggctttgtgcaggcgcgcaaacagctaaaagaacaaggacagtcacttggagaagcacatttatacttcggctgccgttcacctcatgaagactatctgtatcaagaagagcttgaaaacgcccaaagcgaaggcatcattacgcttcataccgctttttctcgcatgccaaatcagccgaaaacatacgttcagcacgtaatggaacaagacggcaagaaattgattgaacttcttgatcaaggagcgcacttctatatttgcggagacggaagccaaatggcacctgccgttgaagcaacgcttatgaaaagctatgctgacgttcaccaagtgagtgaagcagacgctcgcttatggctgcagcagctagaagaaaaaggccgatacgcaaaagacgtgtgggctggg

SEQ ID NO: 104 - protein, 1049 aa, synthetic construct
  REGION 1..1049: note = Variant of cytochrome P450
MTIKEMPQPKTFGELKNLPLLNTDKPVQALMRIADELGEIFKFEAPGSVTRFLSSQRLIKEACDESRFDKNLSQALKFARDFLGDGLFTSWTHEPNWKKAHNILGPSFSQRAMKRYHAMMVDIAVQLVQKWERLNADEHIEVSEDMRRLTLDTMGLCGFNYRFNSFYRDQPHPFIVSMVRALDEVMNKLQRANPDDPAYDENKRQCQEDIKVMNDYVDKIIADRKARGEQSHDLLTQMLNGKDPETGEPLDDGNIRYQIITFLIAGHETTSGLLSFALYFLVKNPHVLQKVAEEAARVLVDPVPSYKQVKQLKYVGMVLNEALRLWPTAPAFSLYAKEDTVLGGEYPLTKGDEVMVLIPQLHRDKTIWGDDVEEFRPERFENPSAIPQHAFKPFGNGQRACIGQQFALHEATLVLGMMLKHFDFEDHTNYELVIKETLTLKPEGFVVKAKSKGIPLGGIPSPSTEQSAKKVRKKAENAHNTPLLVLYGSNAGTAEGTARDLADIAMSKGFAPQVATLDSHAGNLPREGAVLIVTASYNGHPPDNAKQFVDWLDQASADEVKGVRYSVFGCGDKNWAATYQKVPAFIDETLAAKGAENIADRGEADASDDFEGTYEEWRDHMWSDVAAYFNLDIENSEDNKSTLSLQFVDSAADMPLAKMHGAFSTNVVASKELQQPGSARSTRHLEIELPKEASYQEGDHLGVIPRNYEGIVNRVTARFGLSASQQIRLEAEEEKLAHLPLAKTVSVEELLQYVELQDPVTRTQLRAMAAKTVCPPHKVELEALLEKQAYKEQVLAKRLTMLELLEKYPACEMKFSEFIALLPSIRPRYYSISSSPRVDEKQASITVSVVSGPAWSGYGEYKGIASNYLAELQEGDTITCFISTPQSEFTLPKDPETPLIMVGPGTGVAPFRGFVQARKQLKEQGQSLGEAHLYFGCRSPHEDYLYQEELENAQSEGIITLHTAFSRMPNQPKTYVQHVMEQDGKKLIELLDQGAHFYICGDGSQMAPAVEATLMKSYADVHQVSEADARLWLQQLEEKGRYAKDVWAG

SEQ ID NO: 105 - DNA, 3147 bp, synthetic construct
  misc_feature 1..3147: note = Variant of cytochrome P450
  source 1..3147: mol_type = other DNA
atgacaattaaggaaatgcctcagcctaagacgtttggagaacttaaaaatttaccgttattaaacacagataaaccggttcaagctttgatgcgtattgcggatgaattaggagaaatctttaaattcgaggcgcctggtagcgtaacgcgctttttatcaagtcagcgtctaattaaagaagcatgcgatgaatcacgctttgataaaaacttaagtcaagcgctgaaatttgcacgtgattttcttggagacgggttatttacaagctggacgcatgaaccgaattggaaaaaagcgcataatatcttaggcccaagctttagtcagcgtgcaatgaaacgttatcatgcgatgatggtcgatatcgccgtgcagcttgttcaaaagtgggagcgtctaaatgcagatgagcatattgaagtatcggaagacatgcgtcgtttaacgcttgatacaatcggtctttgcggctttaactatcgctttaacagcttttaccgagatcagcctcatccatttattgtgagtatggtccgtgcactggatgaagtgatgaacaagctgcagcgagcaaatccagacgacccagcttatgatgaaaacaagcgccagtgtcaagaagatatcaaggtgatgaacgactatgtagataaaattattgcagatcgcaaagcaaggggtgaacaaagccatgatttattaacgcagatgctaaacggaaaagatccagaaacgggtgagccgcttgatgacgggaacattcgttatcaaattattacattcttaattgcgggacacgaaacaacaagtggtcttttatcatttgcgctgtatttcttagtgaaaaatccacatgtattacaaaaagtagcagaagaagcagcacgagttctagtagatcctgttccaagctacaaacaagtcaaacagcttaaatatgtcggcatggtcttaaacgaagcgctgcgcttatggccaactgctcctgcgttttccctatatgcaaaagaagatacggtgcttggaggagaatatcctttaaccaaaggcgacgaagtaatggttctgattcctcagcttcaccgtgataaaacaatttggggagacgatgtggaggagttccgtccagagcgttttgaaaatccaagtgcgattccgcagcatgcgtttaaaccgtttggaaacggtcagcgtgcgtgtatcggtcagcagttcgctcttcatgaagcaacgctggtacttggtatgatgctaaaacactttgactttgaagatcatacaaactacgagctcgttattaaagaaactttaacgttaaaacctgaaggctttgtggtaaaagcaaaatcgaaaggcattccgcttggcggtattccttcacctagcactgaacagtctgctaaaaaagtacgcaaaaaggcagaaaacgctcataatacgccgctgcttgtgctatacggttcaaatgcgggaacagctgaaggaacggcgcgtgatttagcagatattgcaatgagcaaaggatttgcaccgcaggtcgcaacgcttgattcacacgccggaaatcttccgcgcgaaggagctgtattaattgtaacggcgtcttataacggtcatccgcctgataacgcaaagcaatttgtcgactggttagaccaagcgtctgctgatgaagtaaaaggcgttcgctactccgtatttggatgcggcgataaaaactgggctgcgacgtatcaaaaagtgcctgcttttatcgatgaaacgcttgccgctaaaggggcagaaaacatcgctgaccgcggtgaagcagatgcaagcgacgactttgaaggcacatatgaagaatggcgtgatcatatgtggagtgacgtagcagcctactttaacctcgacattgaaaacagtgaagataataaatctactctttcacttcaatttgtcgacagcgccgcggatatgccgcttgcgaaaatgcacggtgcgttttcaacgaacgtcgtagcaagcaaagaacttcaacagccaggcagtgcacgaagcacgcgacatcttgaaattgaacttccaaaagaagcttcttatcaagaaggagatcatttaggtgttattcctcgcaactatgaaggaatagtaaaccgtgtaacagcaaggttcggcctaagcgcatcacagcaaatccgtctggaagcagaagaagaaaaattagctcatttgccactcgctaaaacagtatccgtagaagagcttctgcaatacgtggagcttcaagatcctgttacgcgcacgcagcttcgcgcaatggctgctaaaacggtctgcccgccgcataaagtagagcttgaagccttgcttgaaaagcaagcctacaaagaacaagtgctggcaaaacgtttaacaatgcttgaactgcttgaaaaatacccggcgtgtgaaatgaaattcagcgaatttatcgcccttctgccaagcatacgcccgcgctattactcgatttcttcatcacctcgtgtcgatgaaaaacaagcaagcatcacggtcagcgttgtctcaggaccggcgtggagcggatatggagaatataaaggaattgcgtcgaactatcttgccgagctgcaagaaggagatacgattacgtgctttatttccacaccgcagtcagaatttacgctgccaaaagaccctgaaacgccgcttatcatggtcggaccgggaacaggcgtcgcgccgtttagaggctttgtgcaggcgcgcaaacagctaaaagaacaaggacagtcacttggagaagcacatttatacttcggctgccgttcacctcatgaagactatctgtatcaagaagagcttgaaaacgcccaaagcgaaggcatcattacgcttcataccgctttttctcgcatgccaaatcagccgaaaacatacgttcagcacgtaatggaacaagacggcaagaaattgattgaacttcttgatcaaggagcgcacttctatatttgcggagacggaagccaaatggcacctgccgttgaagcaacgcttatgaaaagctatgctgacgttcaccaagtgagtgaagcagacgctcgcttatggctgcagcagctagaagaaaaaggccgatacgcaaaagacgtgtgggctggg

SEQ ID NO: 106 - protein, 1049 aa, synthetic construct
  REGION 1..1049: note = Variant of cytochrome P450
MTIKEMPQPKTFGELKNLPLLNTDKPVQALMRIADELGEIFKFEAPGSVTRFLSSQRLIKEACDESRFDKNLSQALKFARDFLGDGLFTSWTHEPNWKKAHNILGPSFSQRAMKRYHAMMVDIAVQLVQKWERLNADEHIEVSEDMRRLTLDTIGLCGFNYRFNSFYRDQPHPFIVSMVRALDEVMNKLQRANPDDPAYDENKRQCQEDIKVMNDYVDKIIADRKARGEQSHDLLTQMLNGKDPETGEPLDDGNIRYQIITFLIAGHETTSGLLSFALYFLVKNPHVLQKVAEEAARVLVDPVPSYKQVKQLKYVGMVLNEALRLWPTAPAFSLYAKEDTVLGGEYPLTKGDEVMVLIPQLHRDKTIWGDDVEEFRPERFENPSAIPQHAFKPFGNGQRACIGQQFALHEATLVLGMMLKHFDFEDHTNYELVIKETLTLKPEGFVVKAKSKGIPLGGIPSPSTEQSAKKVRKKAENAHNTPLLVLYGSNAGTAEGTARDLADIAMSKGFAPQVATLDSHAGNLPREGAVLIVTASYNGHPPDNAKQFVDWLDQASADEVKGVRYSVFGCGDKNWAATYQKVPAFIDETLAAKGAENIADRGEADASDDFEGTYEEWRDHMWSDVAAYFNLDIENSEDNKSTLSLQFVDSAADMPLAKMHGAFSTNVVASKELQQPGSARSTRHLEIELPKEASYQEGDHLGVIPRNYEGIVNRVTARFGLSASQQIRLEAEEEKLAHLPLAKTVSVEELLQYVELQDPVTRTQLRAMAAKTVCPPHKVELEALLEKQAYKEQVLAKRLTMLELLEKYPACEMKFSEFIALLPSIRPRYYSISSSPRVDEKQASITVSVVSGPAWSGYGEYKGIASNYLAELQEGDTITCFISTPQSEFTLPKDPETPLIMVGPGTGVAPFRGFVQARKQLKEQGQSLGEAHLYFGCRSPHEDYLYQEELENAQSEGIITLHTAFSRMPNQPKTYVQHVMEQDGKKLIELLDQGAHFYICGDGSQMAPAVEATLMKSYADVHQVSEADARLWLQQLEEKGRYAKDVWAG

SEQ ID NO: 107 - DNA, 3147 bp, synthetic construct
  misc_feature 1..3147: note = Variant of cytochrome P450
  source 1..3147: mol_type = other DNA
atgacaattaaggaaatgcctcagcctaagacgtttggagaacttaaaaatttaccgttattaaacacagataaaccggttcaagctttgatgcgtattgcggatgaattaggagaaatctttaaattcgaggcgcctggtagcgtaacgcgctttttatcaagtcagcgtctaattaaagaagcatgcgatgaatcacgctttgataaaaacttaagtcaagcgcttaaatttgcacgtgattttcttggagacgggttatttacaagctggacgcatgaaccgaattggaaaaaagcgcataatatcttaggcccaagctttagtcagcgtgcaatgaaacgttatcatgcgatgatggtcgatatcgccgtgcagcttgttcaaaagtgggagcgtctaaatgcagatgagcatattgaagtatcggaagacatgacacgtttaacgcttgatacaattggtctttgcggcttcaactatcgctttaacagcttttaccgagatcagcctcatccatttattgtgagtatggtccgtgcactggatgaagtagggaacaagctgcagcgagcaaatccagacgacccagcttatgatgaaaacaagcgccagtgtcaagaagatatcaaggtgatgaacgactatgtagataaaattattgcagatcgcaaagcaaggggtgaacaaagccatgatttattaacgcagatgctaaacggaaaagatccagaaacgggtgagccgcttgatgacgggaacattcgttatcaaattattacattcttaattgcgggacacgaaacaacaagtggtcttttatcatttgcgctgtatttcttagtgaaaaatccacatgtattacaaaaagtagcagaagaagcagcacgagttctagtagatcctgttccaagctacaaacaagtcaaacagcttaaatatgtcggcatggtcttaaacgaagcgctgcgcttatggccaactgctccagcgttttcgctatatgcaaaagaagatacggtgcttggaggagaatatcctttaaccaaaggcgacgaagtaatggttctgattcctcagcttcaccgtgataaaacaatttggggagacgatgtggaggagttccgtccagagcgttttgaaaatccaagtgcgattccgcagcatgcgtttaaaccgtttggaaacggtcagcgtgcgtgtatcggtcagcagttcgctcttcatgaagcaacgctggtacttggtatgatgctaaaacactttgactttgaagatcatacaaactacgagctcgttattaaagaaactttaacgttaaaacctgaaggctttgtggtaaaagcaaaatcgaaaggcattccgcttggcggtattccttcacctagcactgaacagtctgctaaaaaagtacgcaaaaaggcagaaaacgctcataatacgccgctgcttgtgctatacggttcaaatgcgggaacagctgaaggaacggcgcgtgatttagcagatattgcaatgagcaaaggatttgcaccgcaggtcgcaacgcttgattcacacgccggaaatcttccgcgcgaaggagctgtattaattgtaacggcgtcttataacggtcatccgcctgataacgcaaagcaatttgtcgactggttagaccaagcgtctgctgatgaagtaaaaggcgttcgctactccgtatttggatgcggcgataaaaactgggctgcgacgtatcaaaaagtgcctgcttttatcgatgaaacgcttgccgctaaaggggcagaaaacatcgctgaccgcggtgaagcagatgcaagcgacgactttgaaggcacatatgaagaatggcgtgatcatatgtggagtgacgtagcagcctactttaacctcgacattgaaaacagtgaagataataaatctactctttcacttcaatttgtcgacagcgccgcggatatgccgcttgcgaaaatgcacggtgcgttttcaacgaacgtcgtagcaagcaaagaacttcaacagccaggcagtgcacgaagcacgcgacatcttgaaattgaacttccaaaagaagcttcttatcaagaaggagatcatttaggtgttattcctcgcaactatgaaggaatagtaaaccgtgtaacagcaaggttcggcctaagcgcatcacagcaaatccgtctggaagcagaagaagaaaaattagctcatttgccactcgctaaaacagtatccgtagaagagcttctgcaatacgtggagcttcaagatcctgttacgcgcacgcagcttcgcgcaatggctgctaaaacggtctgcccgccgcataaagtagagcttgaagccttgcttgaaaagcaagcctacaaagaacaagtgctggcaaaacgtttaacaatgcttgaactgcttgaaaaatacccggcgtgtgaaatgaaattcagcgaatttatcgcccttctgccaagcatacgcccgcgctattactcgatttcttcatcacctcgtgtcgatgaaaaacaagcaagcatcacggtcagcgttgtctcaggaccggcgtggagcggatatggagaatataaaggaattgcgtcgaactatcttgccgagctgcaagaaggagatacgattacgtgctttatttccacaccgcagtcagaatttacgctgccaaaagaccctgaaacgccgcttatcatggtcggaccgggaacaggcgtcgcgccgtttagaggctttgtgcaggcgcgcaaacagctaaaagaacaaggacagtcacttggagaagcacatttatacttcggctgccgttcacctcatgaagactatctgtatcaagaagagcttgaaaacgcccaaagcgaaggcatcattacgcttcataccgctttttctcgcatgccaaatcagccgaaaacatacgttcagcacgtaatggaacaagacggcaagaaattgattgaacttcttgatcaaggagcgcacttctatatttgcggagacggaagccaaatggcacctgccgttgaagcaacgcttatgaaaagctatgctgacgttcaccaagtgagtgaagcagacgctcgcttatggctgcagcagctagaagaaaaaggccgatacgcaaaagacgtgtgggctggg

SEQ ID NO: 108 - protein, 1049 aa, synthetic construct
  REGION 1..1049: note = Variant of cytochrome P450
MTIKEMPQPKTFGELKNLPLLNTDKPVQALMRIADELGEIFKFEAPGSVTRFLSSQRLIKEACDESRFDKNLSQALKFARDFLGDGLFTSWTHEPNWKKAHNILGPSFSQRAMKRYHAMMVDIAVQLVQKWERLNADEHIEVSEDMTRLTLDTIGLCGFNYRFNSFYRDQPHPFIVSMVRALDEVGNKLQRANPDDPAYDENKRQCQEDIKVMNDYVDKIIADRKARGEQSHDLLTQMLNGKDPETGEPLDDGNIRYQIITFLIAGHETTSGLLSFALYFLVKNPHVLQKVAEEAARVLVDPVPSYKQVKQLKYVGMVLNEALRLWPTAPAFSLYAKEDTVLGGEYPLTKGDEVMVLIPQLHRDKTIWGDDVEEFRPERFENPSAIPQHAFKPFGNGQRACIGQQFALHEATLVLGMMLKHFDFEDHTNYELVIKETLTLKPEGFVVKAKSKGIPLGGIPSPSTEQSAKKVRKKAENAHNTPLLVLYGSNAGTAEGTARDLADIAMSKGFAPQVATLDSHAGNLPREGAVLIVTASYNGHPPDNAKQFVDWLDQASADEVKGVRYSVFGCGDKNWAATYQKVPAFIDETLAAKGAENIADRGEADASDDFEGTYEEWRDHMWSDVAAYFNLDIENSEDNKSTLSLQFVDSAADMPLAKMHGAFSTNVVASKELQQPGSARSTRHLEIELPKEASYQEGDHLGVIPRNYEGIVNRVTARFGLSASQQIRLEAEEEKLAHLPLAKTVSVEELLQYVELQDPVTRTQLRAMAAKTVCPPHKVELEALLEKQAYKEQVLAKRLTMLELLEKYPACEMKFSEFIALLPSIRPRYYSISSSPRVDEKQASITVSVVSGPAWSGYGEYKGIASNYLAELQEGDTITCFISTPQSEFTLPKDPETPLIMVGPGTGVAPFRGFVQARKQLKEQGQSLGEAHLYFGCRSPHEDYLYQEELENAQSEGIITLHTAFSRMPNQPKTYVQHVMEQDGKKLIELLDQGAHFYICGDGSQMAPAVEATLMKSYADVHQVSEADARLWLQQLEEKGRYAKDVWAG

SEQ ID NO: 109 - DNA, 3147 bp, synthetic construct
  misc_feature 1..3147: note = Variant of cytochrome P450
  source 1..3147: mol_type = other DNA
atgacaattaaggaaatgcctcagcctaagacgtttggagaacttaaaaatttaccgttattaaacacagataaaccggttcaagctttgatgcgtattgcggatgaattaggagaaatctttaaattcgaggcgcctggtagcgtaacgcgctttttatcaagtcagcgtctaattaaagaagcatgcgatgaatcacgctttgataaaaacttaagtcaagcgcttaaatttgcacgtgattttcttggagacgggttatttacaagctggacgcatgaaccgaattggaaaaaagcgcataatatcttaggcccaagctttagtcagcgtgcaatgaaacgttatcatgcgatgatggtcgatatcgccgtgcagcttgttcaaaagtgggagcgtctaaatgcagatgagcatattgaagtatcggaagacatgacacgtttaacgctggatacaattggtctttgcggcttcaactatcgctttaacagcttttaccgagatcagcctcatccatttattgtgagtatggtccgtgcactggatgaagtaatgaacaagctgcagcgagcaaatccagacgacccagcttatgatgaaaacaagcgccagtgtcaagaagatatcaaggtgatgaacgactatgtagataaaattattgcagatcgcaaagcaaggggtgaacaaagccatgatttattaacgcagatgctaaacggaaaagatccagaaacgggtgagccgcttgatgacgggaatattcgttatcaactgattacattcttaattgcgggacacgaaacaacaagtggtcttttatcatttgcgctgtatttcttagtgaaaaatccacatgtattacaaaaagtagcagaagaagcagcacgagttctagtagatcctgttccaagctacaaacaagtcaaacagcttaaatatgtcggcatggtcttaaacgaagcgctgcgcttatggccaactgctccagcgttttcgctatatgcaaaagaagatacggtgcttggaggagaatatcctttaaccaaaggcgacgaagtaatggttctgattcctcagcttcaccgtgataaaacaatttggggagacgatgtggaggagttccgtccagagcgttttgaaaatccaagtgcgattccgcagcatgcgtttaaaccgtttggaaacggtcagcgtgcgtgtatcggtcagcagttcgctcttcatgaagcaacgctggtacttggtatgatgctaaaacactttgactttgaagatcatacaaactacgagctcgttattaaagaaaagttaacgttaaaacctgaaggctttgtggtaaaagcaaaatcgaaaggcattccgcttggcggtattccttcacctagcactgaacagtctgctaaaaaagtacgcaaaaaggcagaaaacgctcataatacgccgctgcttgtgctatacggttcaaatgcgggaacagctgaaggaacggcgcgtgatttagcagatattgcaatgagcaaaggatttgcaccgcaggtcgcaacgcttgattcacacgccggaaatcttccgcgcgaaggagctgtattaattgtaacggcgtcttataacggtcatccgcctgataacgcaaagcaatttgtcgactggttagaccaagcgtctgctgatgaagtaaaaggcgttcgctactccgtatttggatgcggcgataaaaactgggctgcgacgtatcaaaaagtgcctgcttttatcgatgaaacgcttgccgctaaaggggcagaaaacatcgctgaccgcggtgaagcagatgcaagcgacgactttgaaggcacatatgaagaatggcgtgatcatatgtggagtgacgtagcagcctactttaacctcgacattgaaaacagtgaagataataaatctactctttcacttcaatttgtcgacagcgccgcggatatgccgcttgcgaaaatgcacggtgcgttttcaacgaacgtcgtagcaagcaaagaacttcaacagccaggcagtgcacgaagcacgcgacatcttgaaattgaacttccaaaagaagcttcttatcaagaaggagatcatttaggtgttattcctcgcaactatgaaggaatagtaaaccgtgtaacagcaaggttcggcctaagcgcatcacagcaaatccgtctggaagcagaagaagaaaaattagctcatttgccactcgctaaaacagtatccgtagaagagcttctgcaatacgtggagcttcaagatcctgttacgcgcacgcagcttcgcgcaatggctgctaaaacggtctgcccgccgcataaagtagagcttgaagccttgcttgaaaagcaagcctacaaagaacaagtgctggcaaaacgtttaacaatgcttgaactgcttgaaaaatacccggcgtgtgaaatgaaattcagcgaatttatcgcccttctgccaagcatacgcccgcgctattactcgatttcttcatcacctcgtgtcgatgaaaaacaagcaagcatcacggtcagcgttgtctcaggaccggcgtggagcggatatggagaatataaaggaattgcgtcgaactatcttgccgagctgcaagaaggagatacgattacgtgctttatttccacaccgcagtcagaatttacgctgccaaaagaccctgaaacgccgcttatcatggtcggaccgggaacaggcgtcgcgccgtttagaggctttgtgcaggcgcgcaaacagctaaaagaacaaggacagtcacttggagaagcacatttatacttcggctgccgttcacctcatgaagactatctgtatcaagaagagcttgaaaacgcccaaagcgaaggcatcattacgcttcataccgctttttctcgcatgccaaatcagccgaaaacatacgttcagcacgtaatggaacaagacggcaagaaattgattgaacttcttgatcaaggagcgcacttctatatttgcggagacggaagccaaatggcacctgccgttgaagcaacgcttatgaaaagctatgctgacgttcaccaagtgagtgaagcagacgctcgcttatggctgcagcagctagaagaaaaaggccgatacgcaaaagacgtgtgggctggg

SEQ ID NO: 110 - protein, 1049 aa, synthetic construct
  REGION 1..1049: note = Variant of cytochrome P450
MTIKEMPQPKTFGELKNLPLLNTDKPVQALMRIADELGEIFKFEAPGSVTRFLSSQRLIKEACDESRFDKNLSQALKFARDFLGDGLFTSWTHEPNWKKAHNILGPSFSQRAMKRYHAMMVDIAVQLVQKWERLNADEHIEVSEDMTRLTLDTIGLCGFNYRFNSFYRDQPHPFIVSMVRALDEVMNKLQRANPDDPAYDENKRQCQEDIKVMNDYVDKIIADRKARGEQSHDLLTQMLNGKDPETGEPLDDGNIRYQLITFLIAGHETTSGLLSFALYFLVKNPHVLQKVAEEAARVLVDPVPSYKQVKQLKYVGMVLNEALRLWPTAPAFSLYAKEDTVLGGEYPLTKGDEVMVLIPQLHRDKTIWGDDVEEFRPERFENPSAIPQHAFKPFGNGQRACIGQQFALHEATLVLGMMLKHFDFEDHTNYELVIKEKLTLKPEGFVVKAKSKGIPLGGIPSPSTEQSAKKVRKKAENAHNTPLLVLYGSNAGTAEGTARDLADIAMSKGFAPQVATLDSHAGNLPREGAVLIVTASYNGHPPDNAKQFVDWLDQASADEVKGVRYSVFGCGDKNWAATYQKVPAFIDETLAAKGAENIADRGEADASDDFEGTYEEWRDHMWSDVAAYFNLDIENSEDNKSTLSLQFVDSAADMPLAKMHGAFSTNVVASKELQQPGSARSTRHLEIELPKEASYQEGDHLGVIPRNYEGIVNRVTARFGLSASQQIRLEAEEEKLAHLPLAKTVSVEELLQYVELQDPVTRTQLRAMAAKTVCPPHKVELEALLEKQAYKEQVLAKRLTMLELLEKYPACEMKFSEFIALLPSIRPRYYSISSSPRVDEKQASITVSVVSGPAWSGYGEYKGIASNYLAELQEGDTITCFISTPQSEFTLPKDPETPLIMVGPGTGVAPFRGFVQARKQLKEQGQSLGEAHLYFGCRSPHEDYLYQEELENAQSEGIITLHTAFSRMPNQPKTYVQHVMEQDGKKLIELLDQGAHFYICGDGSQMAPAVEATLMKSYADVHQVSEADARLWLQQLEEKGRYAKDVWAG

SEQ ID NO: 111 - DNA, 3147 bp, synthetic construct
  misc_feature 1..3147: note = Variant of cytochrome P450
  source 1..3147: mol_type = other DNA
atgacaattaaggaaatgcctcagcctaagacgtttggagaacttaaaaatttaccgttattaaacacagataaaccggttcaagctttgatgcgtattgcggatgaattaggagaaatctttaaattcgaggcgcctggtagcgtaacgcgctttttatcaagtcagcgtctaattaaagaagcatgcgatgaatcacgctttgataaaaacttaagtcaagcgctgaaatttgcacgtgattttcttggagacgggttatttacaagctggacgcatgaaccgaattggaaaaaagcgcataatatcttaggcccaagctttagtcagcgtgcaatgaaacgttatcatgcgatgatggtcgatatcgccgtgcagcttgttcaaaagtgggagcgtctaaatgcagatgagcatattgaagtatcggaagacatgcgtcgtttaacgcttgatacaatcggtctttgcggctttaactatcgctttaacagcttttaccgagatcagcctcatccatttattgtgagtatggtccgtgcactggatgaagtaatgaacaagctgcagcgagcaaatccagacgacccagcttatgatgaaaacaagcgccagtgtcaagaagatatcaaggtgatgaacgactatgtagataaaattattgcagatcgcaaagcaaggggtgaacaaagccatgatttattaacgcagatgctaaacggaaaagatccagaaacgggtgagccgcttgatgacgggctgattcgttatcaaatcattacattcttaattgcgggacacgaaacaacaagtggtcttttatcatttgcgctgtatttcttagtgaaaaatccacatgtattacaaaaagtagcagaagaagcagcacgagttctagtagatcctgttccaagctacaaacaagtcaaacagcttaaatatgtcggcatggtcttaaacgaagcgctgcgcttatggccaactgctcctgtgttttcgctatatgcaaaagaagatacggtgcttggaggagaatatcctttaaccaaaggcgacgaagtaatggttctgattcctcagcttcaccgtgataaaacaatttggggagacgatgtggaggagttccgtccagagcgttttgaaaatccaagtgcgattccgcagcatgcgtttaaaccgtttggaaacggtcagcgtgcgtgtatcggtcagcagttcgctcttcatgaagcaacgctggtacttggtatgatgctaaaacactttgactttgaagatcatacaaactacgagctcgttattaaagaaactttaacgttaaaacctgaaggctttgtggtaaaagcaaaatcgaaaggcattccgcttggcggtattccttcacctagcactgaacagtctgctaaaaaagtacgcaaaaaggcagaaaacgctcataatacgccgctgcttgtgctatacggttcaaatgcgggaacagctgaaggaacggcgcgtgatttagcagatattgcaatgagcaaaggatttgcaccgcaggtcgcaacgcttgattcacacgccggaaatcttccgcgcgaaggagctgtattaattgtaacggcgtcttataacggtcatccgcctgataacgcaaagcaatttgtcgactggttagaccaagcgtctgctgatgaagtaaaaggcgttcgctactccgtatttggatgcggcgataaaaactgggctgcgacgtatcaaaaagtgcctgcttttatcgatgaaacgcttgccgctaaaggggcagaaaacatcgctgaccgcggtgaagcagatgcaagcgacgactttgaaggcacatatgaagaatggcgtgatcatatgtggagtgacgtagcagcctactttaacctcgacattgaaaacagtgaagataataaatctactctttcacttcaatttgtcgacagcgccgcggatatgccgcttgcgaaaatgcacggtgcgttttcaacgaacgtcgtagcaagcaaagaacttcaacagccaggcagtgcacgaagcacgcgacatcttgaaattgaacttccaaaagaagcttcttatcaagaaggagatcatttaggtgttattcctcgcaactatgaaggaatagtaaaccgtgtaacagcaaggttcggcctaagcgcatcacagcaaatccgtctggaagcagaagaagaaaaattagctcatttgccactcgctaaaacagtatccgtagaagagcttctgcaatacgtggagcttcaagatcctgttacgcgcacgcagcttcgcgcaatggctgctaaaacggtctgcccgccgcataaagtagagcttgaagccttgcttgaaaagcaagcctacaaagaacaagtgctggcaaaacgtttaacaatgcttgaactgcttgaaaaatacccggcgtgtgaaatgaaattcagcgaatttatcgcccttctgccaagcatacgcccgcgctattactcgatttcttcatcacctcgtgtcgatgaaaaacaagcaagcatcacggtcagcgttgtctcaggaccggcgtggagcggatatggagaatataaaggaattgcgtcgaactatcttgccgagctgcaagaaggagatacgattacgtgctttatttccacaccgcagtcagaatttacgctgccaaaagaccctgaaacgccgcttatcatggtcggaccgggaacaggcgtcgcgccgtttagaggctttgtgcaggcgcgcaaacagctaaaagaacaaggacagtcacttggagaagcacatttatacttcggctgccgttcacctcatgaagactatctgtatcaagaagagcttgaaaacgcccaaagcgaaggcatcattacgcttcataccgctttttctcgcatgccaaatcagccgaaaacatacgttcagcacgtaatggaacaagacggcaagaaattgattgaacttcttgatcaaggagcgcacttctatatttgcggagacggaagccaaatggcacctgccgttgaagcaacgcttatgaaaagctatgctgacgttcaccaagtgagtgaagcagacgctcgcttatggctgcagcagctagaagaaaaaggccgatacgcaaaagacgtgtgggctggg

SEQ ID NO: 112 - protein, 1049 aa, synthetic construct
  REGION 1..1049: note = Variant of cytochrome P450
MTIKEMPQPKTFGELKNLPLLNTDKPVQALMRIADELGEIFKFEAPGSVTRFLSSQRLIKEACDESRFDKNLSQALKFARDFLGDGLFTSWTHEPNWKKAHNILGPSFSQRAMKRYHAMMVDIAVQLVQKWERLNADEHIEVSEDMRRLTLDTIGLCGFNYRFNSFYRDQPHPFIVSMVRALDEVMNKLQRANPDDPAYDENKRQCQEDIKVMNDYVDKIIADRKARGEQSHDLLTQMLNGKDPETGEPLDDGLIRYQIITFLIAGHETTSGLLSFALYFLVKNPHVLQKVAEEAARVLVDPVPSYKQVKQLKYVGMVLNEALRLWPTAPVFSLYAKEDTVLGGEYPLTKGDEVMVLIPQLHRDKTIWGDDVEEFRPERFENPSAIPQHAFKPFGNGQRACIGQQFALHEATLVLGMMLKHFDFEDHTNYELVIKETLTLKPEGFVVKAKSKGIPLGGIPSPSTEQSAKKVRKKAENAHNTPLLVLYGSNAGTAEGTARDLADIAMSKGFAPQVATLDSHAGNLPREGAVLIVTASYNGHPPDNAKQFVDWLDQASADEVKGVRYSVFGCGDKNWAATYQKVPAFIDETLAAKGAENIADRGEADASDDFEGTYEEWRDHMWSDVAAYFNLDIENSEDNKSTLSLQFVDSAADMPLAKMHGAFSTNVVASKELQQPGSARSTRHLEIELPKEASYQEGDHLGVIPRNYEGIVNRVTARFGLSASQQIRLEAEEEKLAHLPLAKTVSVEELLQYVELQDPVTRTQLRAMAAKTVCPPHKVELEALLEKQAYKEQVLAKRLTMLELLEKYPACEMKFSEFIALLPSIRPRYYSISSSPRVDEKQASITVSVVSGPAWSGYGEYKGIASNYLAELQEGDTITCFISTPQSEFTLPKDPETPLIMVGPGTGVAPFRGFVQARKQLKEQGQSLGEAHLYFGCRSPHEDYLYQEELENAQSEGIITLHTAFSRMPNQPKTYVQHVMEQDGKKLIELLDQGAHFYICGDGSQMAPAVEATLMKSYADVHQVSEADARLWLQQLEEKGRYAKDVWAG

SEQ ID NO: 113 - DNA, 3147 bp, synthetic construct
  misc_feature 1..3147: note = Variant of cytochrome P450
  source 1..3147: mol_type = other DNA
atgacaattaaggaaatgcctcagcctaagacgtttggagaacttaaaaatttaccgttattaaacacagataaaccggttcaagctttgatgcgtattgcggatgaattaggagaaatctttaaattcgaggcgcctggtagcgtaacgcgctttttatcaagtcagcgtctaattaaagaagcatgcgatgaatcacgctttgataaaaacttaagtcaagcgcttaaatttgcacgtgattttcttggagacgggttatttacaagctggacgcatgaaccgaattggaaaaaagcgcataatatcttaggcccaagctttagtcagcgtgcaatgaaacgttatcatgcgatgatggtcgatatcgccgtgcagcttgttcaaaagtgggagcgtctaaatgcagatgagcatattgaagtatcggaagacatgacacgtttaacggtggatacaattggtctttgcggcttcaactatcgctttaacagcttttaccgagatcagcctcatccatttattgtgagtatggtgcgtgcactggatgaagtaatgaacaagctgcagcgagcaaatccagacgacccagcttatgatgaaaacaagcgccagtgtcaagaagatatcaaggtgatgaacgactatgtagataaaattattgcagatcgcaaagcaaggggtgaacaaagccatgatttattaacgcagatgctaaacggaaaagatccagaaacgggtgagccgcttgatgacgggaacattcgttatcaaattattacattcttaattgcgggacacgaaacaacaagtggtcttttatcatttgcgctgtatttcttagtgaaaaatccacatgtattacaaaaagtagcagaagaagcagcacgagttctagtagatcctgttccaagctacaaacaagtcaaacagcttaaatatgtcggcatggtcttaaacgaagcgctgcgcttatggccaactgctcctgcgttttccctatatgcaaaagaagatacggtgcttggaggagaatatcctttaaccaaaggcgacgaagtaatggttctgattcctcagcttcaccgtgataaaacaatttggggagacgatgtggaggagttccgtccagagcgttttgaaaatccaagtgcgattccgcagcatgcgtttaaaccgtttggaaacggtcagcgtgcgtgtatcggtcagcagttcgctcttcatgaagcaacgctggtacttggtatgatgctaaaacactttgactttgaagatcatacaaactacgagctcgttattaaagaaactttaacgttaaaacctgaaggctttgtggtaaaagcaaaatcgaaaggcattccgcttggcggtattccttcacctagcactgaacagtctgctaaaaaagtacgcaaaaaggcagaaaacgctcataatacgccgctgcttgtgctatacggttcaaatgcgggaacagctgaaggaacggcgcgtgatttagcagatattgcaatgagcaaaggatttgcaccgcaggtcgcaacgcttgattcacacgccggaaatcttccgcgcgaaggagctgtattaattgtaacggcgtcttataacggtcatccgcctgataacgcaaagcaatttgtcgactggttagaccaagcgtctgctgatgaagtaaaaggcgttcgctactccgtatttggatgcggcgataaaaactgggctgcgacgtatcaaaaagtgcctgcttttatcgatgaaacgcttgccgctaaaggggcagaaaacatcgctgaccgcggtgaagcagatgcaagcgacgactttgaaggcacatatgaagaatggcgtgatcatatgtggagtgacgtagcagcctactttaacctcgacattgaaaacagtgaagataataaatctactctttcacttcaatttgtcgacagcgccgcggatatgccgcttgcgaaaatgcacggtgcgttttcaacgaacgtcgtagcaagcaaagaacttcaacagccaggcagtgcacgaagcacgcgacatcttgaaattgaacttccaaaagaagcttcttatcaagaaggagatcatttaggtgttattcctcgcaactatgaaggaatagtaaaccgtgtaacagcaaggttcggcctaagcgcatcacagcaaatccgtctggaagcagaagaagaaaaattagctcatttgccactcgctaaaacagtatccgtagaagagcttctgcaatacgtggagcttcaagatcctgttacgcgcacgcagcttcgcgcaatggctgctaaaacggtctgcccgccgcataaagtagagcttgaagccttgcttgaaaagcaagcctacaaagaacaagtgctggcaaaacgtttaacaatgcttgaactgcttgaaaaatacccggcgtgtgaaatgaaattcagcgaatttatcgcccttctgccaagcatacgcccgcgctattactcgatttcttcatcacctcgtgtcgatgaaaaacaagcaagcatcacggtcagcgttgtctcaggaccggcgtggagcggatatggagaatataaaggaattgcgtcgaactatcttgccgagctgcaagaaggagatacgattacgtgctttatttccacaccgcagtcagaatttacgctgccaaaagaccctgaaacgccgcttatcatggtcggaccgggaacaggcgtcgcgccgtttagaggctttgtgcaggcgcgcaaacagctaaaagaacaaggacagtcacttggagaagcacatttatacttcggctgccgttcacctcatgaagactatctgtatcaagaagagcttgaaaacgcccaaagcgaaggcatcattacgcttcataccgctttttctcgcatgccaaatcagccgaaaacatacgttcagcacgtaatggaacaagacggcaagaaattgattgaacttcttgatcaaggagcgcacttctatatttgcggagacggaagccaaatggcacctgccgttgaagcaacgcttatgaaaagctatgctgacgttcaccaagtgagtgaagcagacgctcgcttatggctgcagcagctagaagaaaaaggccgatacgcaaaagacgtgtgggctggg

SEQ ID NO: 114 - protein, 1049 aa, synthetic construct
  REGION 1..1049: note = Variant of cytochrome P450
MTIKEMPQPKTFGELKNLPLLNTDKPVQALMRIADELGEIFKFEAPGSVTRFLSSQRLIKEACDESRFDKNLSQALKFARDFLGDGLFTSWTHEPNWKKAHNILGPSFSQRAMKRYHAMMVDIAVQLVQKWERLNADEHIEVSEDMTRLTVDTIGLCGFNYRFNSFYRDQPHPFIVSMVRALDEVMNKLQRANPDDPAYDENKRQCQEDIKVMNDYVDKIIADRKARGEQSHDLLTQMLNGKDPETGEPLDDGNIRYQIITFLIAGHETTSGLLSFALYFLVKNPHVLQKVAEEAARVLVDPVPSYKQVKQLKYVGMVLNEALRLWPTAPAFSLYAKEDTVLGGEYPLTKGDEVMVLIPQLHRDKTIWGDDVEEFRPERFENPSAIPQHAFKPFGNGQRACIGQQFALHEATLVLGMMLKHFDFEDHTNYELVIKETLTLKPEGFVVKAKSKGIPLGGIPSPSTEQSAKKVRKKAENAHNTPLLVLYGSNAGTAEGTARDLADIAMSKGFAPQVATLDSHAGNLPREGAVLIVTASYNGHPPDNAKQFVDWLDQASADEVKGVRYSVFGCGDKNWAATYQKVPAFIDETLAAKGAENIADRGEADASDDFEGTYEEWRDHMWSDVAAYFNLDIENSEDNKSTLSLQFVDSAADMPLAKMHGAFSTNVVASKELQQPGSARSTRHLEIELPKEASYQEGDHLGVIPRNYEGIVNRVTARFGLSASQQIRLEAEEEKLAHLPLAKTVSVEELLQYVELQDPVTRTQLRAMAAKTVCPPHKVELEALLEKQAYKEQVLAKRLTMLELLEKYPACEMKFSEFIALLPSIRPRYYSISSSPRVDEKQASITVSVVSGPAWSGYGEYKGIASNYLAELQEGDTITCFISTPQSEFTLPKDPETPLIMVGPGTGVAPFRGFVQARKQLKEQGQSLGEAHLYFGCRSPHEDYLYQEELENAQSEGIITLHTAFSRMPNQPKTYVQHVMEQDGKKLIELLDQGAHFYICGDGSQMAPAVEATLMKSYADVHQVSEADARLWLQQLEEKGRYAKDVWAG

SEQ ID NO: 115 - DNA, 3147 bp, synthetic construct
  misc_feature 1..3147: note = Variant of cytochrome P450
  source 1..3147: mol_type = other DNA
atgacaattaaggaaatgcctcagcctaagacgtttggagaacttaaaaatttaccgttattaaacacagataaaccggttcaagctttgatgcgtattgcggatgaattaggagaaatctttaaattcgaggcgcctggtagcgtaacgcgctttttatcaagtcagcgtctaattaaagaagcatgcgatgaatcacgctttgataaaaacttaagtcaagcccttaaatttgcacgtgattttcttggagacgggttatttacaagctggacgcatgaaccgaattggaaaaaagcgcataatatcttaggcccaagctttagtcagcgtgcaatgaaacgttatcatgcgatgatggtcgatatcgccgtgcagcttgttcaaaagtgggagcgtctaaatgcagatgagcatattgaagtatcggaagacatgacacgtttaacgcttgatacaattggtctttgcggcttcaactatcgctttaacagcttttaccgagatcagcctcatccatttattgtgagtatggtccgtgcactggatgaagtaatgaacaagctgcagcgagcaaatccagacgacccagcttatgatgaaaacaagcgccagtgtcaagaagatatcaaggtgatgaacgactatctggataaaattattgcagatcgcaaagcaaggggtgaacaaagccatgatttattaacgcagatgctaaacggaaaagatccagaaacgggtgagccgcttgatgacgggaacattcgttatcaaattattacattcttaattgcgggacacgaaacaacaagtggtcttttatcatttgcgctgtatttcttagtgaaaaatccacatgtattacaaaaagtagcagaagaagcagcacgagttctagtagatcctgttccaagctacaaacaagtcaaacagcttaaatatgtcggcatggtcttaaacgaagcgctgcgcttatggccaactgctccagcgttttcgctatatgcaaaagaagatacggtgcttggaggagaatatcctttaaccaaaggcgacgaagtaatggttctgattcctcagcttcaccgtgataaaacaatttggggagacgatgtggaggagttccgtccagagcgttttgaaaatccaagtgcgattccgcagcatgcgtttaaaccgtttggaaacggtcagcgtgcgtgtatcggtcagcagttcgctcttcatgaagcaacgctggtacttggtatgatgctaaaacactttgactttgaagatcatacaaactacgagctcgttattaaagaaaagttaacgttaaaacctgaaggctttgtggtaaaagcaaaatcgaaaggcattccgcttggcggtattccttcacctagcactgaacagtctgctaaaaaagtacgcaaaaaggcagaaaacgctcataatacgccgctgcttgtgctatacggttcaaatgcgggaacagctgaaggaacggcgcgtgatttagcagatattgcaatgagcaaaggatttgcaccgcaggtcgcaacgcttgattcacacgccggaaatcttccgcgcgaaggagctgtattaattgtaacggcgtcttataacggtcatccgcctgataacgcaaagcaatttgtcgactggttagaccaagcgtctgctgatgaagtaaaaggcgttcgctactccgtatttggatgcggcgataaaaactgggctgcgacgtatcaaaaagtgcctgcttttatcgatgaaacgcttgccgctaaaggggcagaaaacatcgctgaccgcggtgaagcagatgcaagcgacgactttgaaggcacatatgaagaatggcgtgatcatatgtggagtgacgtagcagcctactttaacctcgacattgaaaacagtgaagataataaatctactctttcacttcaatttgtcgacagcgccgcggatatgccgcttgcgaaaatgcacggtgcgttttcaacgaacgtcgtagcaagcaaagaacttcaacagccaggcagtgcacgaagcacgcgacatcttgaaattgaacttccaaaagaagcttcttatcaagaaggagatcatttaggtgttattcctcgcaactatgaaggaatagtaaaccgtgtaacagcaaggttcggcctaagcgcatcacagcaaatccgtctggaagcagaagaagaaaaattagctcatttgccactcgctaaaacagtatccgtagaagagcttctgcaatacgtggagcttcaagatcctgttacgcgcacgcagcttcgcgcaatggctgctaaaacggtctgcccgccgcataaagtagagcttgaagccttgcttgaaaagcaagcctacaaagaacaagtgctggcaaaacgtttaacaatgcttgaactgcttgaaaaatacccggcgtgtgaaatgaaattcagcgaatttatcgcccttctgccaagcatacgcccgcgctattactcgatttcttcatcacctcgtgtcgatgaaaaacaagcaagcatcacggtcagcgttgtctcaggaccggcgtggagcggatatggagaatataaaggaattgcgtcgaactatcttgccgagctgcaagaaggagatacgattacgtgctttatttccacaccgcagtcagaatttacgctgccaaaagaccctgaaacgccgcttatcatggtcggaccgggaacaggcgtcgcgccgtttagaggctttgtgcaggcgcgcaaacagctaaaagaacaaggacagtcacttggagaagcacatttatacttcggctgccgttcacctcatgaagactatctgtatcaagaagagcttgaaaacgcccaaagcgaaggcatcattacgcttcataccgctttttctcgcatgccaaatcagccgaaaacatacgttcagcacgtaatggaacaagacggcaagaaattgattgaacttcttgatcaaggagcgcacttctatatttgcggagacggaagccaaatggcacctgccgttgaagcaacgcttatgaaaagctatgctgacgttcaccaagtgagtgaagcagacgctcgcttatggctgcagcagctagaagaaaaaggccgatacgcaaaagacgtgtgggctggg

SEQ ID NO: 116 - protein, 1049 aa, synthetic construct
  REGION 1..1049: note = Variant of cytochrome P450
MTIKEMPQPKTFGELKNLPLLNTDKPVQALMRIADELGEIFKFEAPGSVTRFLSSQRLIKEACDESRFDKNLSQALKFARDFLGDGLFTSWTHEPNWKKAHNILGPSFSQRAMKRYHAMMVDIAVQLVQKWERLNADEHIEVSEDMTRLTLDTIGLCGFNYRFNSFYRDQPHPFIVSMVRALDEVMNKLQRANPDDPAYDENKRQCQEDIKVMNDYLDKIIADRKARGEQSHDLLTQMLNGKDPETGEPLDDGNIRYQIITFLIAGHETTSGLLSFALYFLVKNPHVLQKVAEEAARVLVDPVPSYKQVKQLKYVGMVLNEALRLWPTAPAFSLYAKEDTVLGGEYPLTKGDEVMVLIPQLHRDKTIWGDDVEEFRPERFENPSAIPQHAFKPFGNGQRACIGQQFALHEATLVLGMMLKHFDFEDHTNYELVIKEKLTLKPEGFVVKAKSKGIPLGGIPSPSTEQSAKKVRKKAENAHNTPLLVLYGSNAGTAEGTARDLADIAMSKGFAPQVATLDSHAGNLPREGAVLIVTASYNGHPPDNAKQFVDWLDQASADEVKGVRYSVFGCGDKNWAATYQKVPAFIDETLAAKGAENIADRGEADASDDFEGTYEEWRDHMWSDVAAYFNLDIENSEDNKSTLSLQFVDSAADMPLAKMHGAFSTNVVASKELQQPGSARSTRHLEIELPKEASYQEGDHLGVIPRNYEGIVNRVTARFGLSASQQIRLEAEEEKLAHLPLAKTVSVEELLQYVELQDPVTRTQLRAMAAKTVCPPHKVELEALLEKQAYKEQVLAKRLTMLELLEKYPACEMKFSEFIALLPSIRPRYYSISSSPRVDEKQASITVSVVSGPAWSGYGEYKGIASNYLAELQEGDTITCFISTPQSEFTLPKDPETPLIMVGPGTGVAPFRGFVQARKQLKEQGQSLGEAHLYFGCRSPHEDYLYQEELENAQSEGIITLHTAFSRMPNQPKTYVQHVMEQDGKKLIELLDQGAHFYICGDGSQMAPAVEATLMKSYADVHQVSEADARLWLQQLEEKGRYAKDVWAG

SEQ ID NO: 117 - DNA, 3147 bp, synthetic construct
  misc_feature 1..3147: note = Variant of cytochrome P450
  source 1..3147: mol_type = other DNA
atgacaattaaggaaatgcctcagcctaagacgtttggagaacttaaaaatttaccgttattaaacacagataaaccggttcaagctttgatgcgtattgcggatgaattaggagaaatctttaaattcgaggcgcctggtagcgtaacgcgctttttatcaagtcagcgtctaattaaagaagcatgcgatgaatcacgctttgataaaaacttaagtcaagcgcttaaatttgcacgtgattttcttggagacgggttatttacaagctggacgcatgaaccgaattggaaaaaagcgcataatatcttaggcccaagctttagtcagcgtgcaatgaaacgttatcatgcgatgatggtcgatatcgccgtgcagcttgttcaaaagtgggagcgtctaaatgcagatgagcatattgaagtatcggaagacatgacacgtttaacgcttgatacaatgggtctttgcggctttaactatcgctttaacagcttttaccgagatcagcctcatccatttattgtgagtatggtccgtgcactggatgaactgatgaacaagctgcagcgagcaaatccagacgacccagcttatgatgaaaacaagcgccagtgtcaagaagatatcaaggtgatgaacgactatgtagataaaattattgcagatcgcaaagcaaggggtgaacaaagccatgatttattaacgcagatgctaaacggaaaagatccagaaacgggtgagccgcttgatgacgggaacattcgttatcaaattattacattcttaattgcgggacacgaaacaacaagtggtcttttatcatttgcgctgtatttcttagtgaaaaatccacatgtattacaaaaagtagcagaagaagcagcacgagttctagtagatcctgttccaagctacaaacaagtcaaacagcttaaatatgtcggcatggtcttaaacgaagcgctgcgcttatggccaactgctcctgcgttttcgctatatgcaaaagaagatacggtgcttggaggagaatatcctttaaccaaaggcgacgaagtaatggttctgattcctcagcttcaccgtgataaaacaatttggggagacgatgtggaggagttccgtccagagcgttttgaaaatccaagtgcgattccgcagcatgcgtttaaaccgtttggaaacggtcagcgtgcgtgtatcggtcagcagttcgctcttcatgaagcaacgctggtacttggtatgatgctaaaacactttgactttgaagatcatacaaactacgagctcgttattaaagaaactttaacgttaaaacctgaaggctttgtggtaaaagcaaaatcgaaaggcattccgcttggcggtattccttcacctagcactgaacagtctgctaaaaaagtacgcaaaaaggcagaaaacgctcataatacgccgctgcttgtgctatacggttcaaatgcgggaacagctgaaggaacggcgcgtgatttagcagatattgcaatgagcaaaggatttgcaccgcaggtcgcaacgcttgattcacacgccggaaatcttccgcgcgaaggagctgtattaattgtaacggcgtcttataacggtcatccgcctgataacgcaaagcaatttgtcgactggttagaccaagcgtctgctgatgaagtaaaaggcgttcgctactccgtatttggatgcggcgataaaaactgggctgcgacgtatcaaaaagtgcctgcttttatcgatgaaacgcttgccgctaaaggggcagaaaacatcgctgaccgcggtgaagcagatgcaagcgacgactttgaaggcacatatgaagaatggcgtgatcatatgtggagtgacgtagcagcctactttaacctcgacattgaaaacagtgaagataataaatctactctttcacttcaatttgtcgacagcgccgcggatatgccgcttgcgaaaatgcacggtgcgttttcaacgaacgtcgtagcaagcaaagaacttcaacagccaggcagtgcacgaagcacgcgacatcttgaaattgaacttccaaaagaagcttcttatcaagaaggagatcatttaggtgttattcctcgcaactatgaaggaatagtaaaccgtgtaacagcaaggttcggcctaagcgcatcacagcaaatccgtctggaagcagaagaagaaaaattagctcatttgccactcgctaaaacagtatccgtagaagagcttctgcaatacgtggagcttcaagatcctgttacgcgcacgcagcttcgcgcaatggctgctaaaacggtctgcccgccgcataaagtagagcttgaagccttgcttgaaaagcaagcctacaaagaacaagtgctggcaaaacgtttaacaatgcttgaactgcttgaaaaatacccggcgtgtgaaatgaaattcagcgaatttatcgcccttctgccaagcatacgcccgcgctattactcgatttcttcatcacctcgtgtcgatgaaaaacaagcaagcatcacggtcagcgttgtctcaggaccggcgtggagcggatatggagaatataaaggaattgcgtcgaactatcttgccgagctgcaagaaggagatacgattacgtgctttatttccacaccgcagtcagaatttacgctgccaaaagaccctgaaacgccgcttatcatggtcggaccgggaacaggcgtcgcgccgtttagaggctttgtgcaggcgcgcaaacagctaaaagaacaaggacagtcacttggagaagcacatttatacttcggctgccgttcacctcatgaagactatctgtatcaagaagagcttgaaaacgcccaaagcgaaggcatcattacgcttcataccgctttttctcgcatgccaaatcagccgaaaacatacgttcagcacgtaatggaacaagacggcaagaaattgattgaacttcttgatcaaggagcgcacttctatatttgcggagacggaagccaaatggcacctgccgttgaagcaacgcttatgaaaagctatgctgacgttcaccaagtgagtgaagcagacgctcgcttatggctgcagcagctagaagaaaaaggccgatacgcaaaagacgtgtgggctggg

SEQ ID NO: 118 - protein, 1049 aa, synthetic construct
  REGION 1..1049: note = Variant of cytochrome P450
MTIKEMPQPKTFGELKNLPLLNTDKPVQALMRIADELGEIFKFEAPGSVTRFLSSQRLIKEACDESRFDKNLSQALKFARDFLGDGLFTSWTHEPNWKKAHNILGPSFSQRAMKRYHAMMVDIAVQLVQKWERLNADEHIEVSEDMTRLTLDTMGLCGFNYRFNSFYRDQPHPFIVSMVRALDELMNKLQRANPDDPAYDENKRQCQEDIKVMNDYVDKIIADRKARGEQSHDLLTQMLNGKDPETGEPLDDGNIRYQIITFLIAGHETTSGLLSFALYFLVKNPHVLQKVAEEAARVLVDPVPSYKQVKQLKYVGMVLNEALRLWPTAPAFSLYAKEDTVLGGEYPLTKGDEVMVLIPQLHRDKTIWGDDVEEFRPERFENPSAIPQHAFKPFGNGQRACIGQQFALHEATLVLGMMLKHFDFEDHTNYELVIKETLTLKPEGFVVKAKSKGIPLGGIPSPSTEQSAKKVRKKAENAHNTPLLVLYGSNAGTAEGTARDLADIAMSKGFAPQVATLDSHAGNLPREGAVLIVTASYNGHPPDNAKQFVDWLDQASADEVKGVRYSVFGCGDKNWAATYQKVPAFIDETLAAKGAENIADRGEADASDDFEGTYEEWRDHMWSDVAAYFNLDIENSEDNKSTLSLQFVDSAADMPLAKMHGAFSTNVVASKELQQPGSARSTRHLEIELPKEASYQEGDHLGVIPRNYEGIVNRVTARFGLSASQQIRLEAEEEKLAHLPLAKTVSVEELLQYVELQDPVTRTQLRAMAAKTVCPPHKVELEALLEKQAYKEQVLAKRLTMLELLEKYPACEMKFSEFIALLPSIRPRYYSISSSPRVDEKQASITVSVVSGPAWSGYGEYKGIASNYLAELQEGDTITCFISTPQSEFTLPKDPETPLIMVGPGTGVAPFRGFVQARKQLKEQGQSLGEAHLYFGCRSPHEDYLYQEELENAQSEGIITLHTAFSRMPNQPKTYVQHVMEQDGKKLIELLDQGAHFYICGDGSQMAPAVEATLMKSYADVHQVSEADARLWLQQLEEKGRYAKDVWAG

SEQ ID NO: 119 - DNA, 3147 bp, synthetic construct
  misc_feature 1..3147: note = Variant of cytochrome P450
  source 1..3147: mol_type = other DNA
atgacaattaaggaaatgcctcagcctaagacgtttggagaacttaaaaatttaccgttattaaacacagataaaccggttcaagctttgatgcgtattgcggatgaattaggagaaatctttaaattcgaggcgcctggtagcgtaacgcgctttttatcaagtcagcgtctaattaaagaagcatgcgatgaatcacgctttgataaaaacttaagtcaagcgcttaaatttgcacgtgattttcttggagacgggttatttacaagctggacgcatgaaccgaattggaaaaaagcgcataatatcttaggcccaagctttagtcagcgtgcaatgaaacgttatcatgcgatgatggtcgatatcgccgtgcagcttgttcaaaagtgggagcgtctaaatgcagatgagcatattgaagtatcggaagacatgcgtcgtttaacgcttgatacaatcggtctttgcggctttaactatcgctttaacagcttttaccgagatcagcctcatccatttattgtgagtatggtccgtgcactggatgaagtaatgaacaagctgcagcgagcaaatccagacgacccagcttatgatgaaaacaagcgccagtgtcaagaagatatcaaggtgatgaacgactatgtagataaaattattgcagatcgcaaagcaaggggtgaacaaagccatgatttattaacgcagatgctaaacggaaaagatccagaaacgggtgagccgcttgatgacgggaacattcgttatcaaattattacattcttaattgcgggacacgaaacaacaagtggtcttttatcatttgcgctgtatttcttagtgaaaaatccacatgtattacaaaaagtagcagaagaagcagcacgagttctagtagatcctgttccaagctacaaacaagtcaaacagcttaaatatgtcggcatggtcttaaacgaagcgctgcgcttatggccaactgctcctctgttttcgctatatgcaaaagaagatacggtgcttggaggagaatatcctttaaccaaaggcgacgaagtaatggttctgattcctcagcttcaccgtgataaaacaatttggggagacgatgtggaggagttccgtccagagcgttttgaaaatccaagtgcgattccgcagcatgcgtttaaaccgtttggaaacggtcagcgtgcgtgtatcggtcagcagttcgctcttcatgaagcaacgctggtacttggtatgatgctaaaacactttgactttgaagatcatacaaactacgagctcgttattaaagaaactttaacgttaaaacctgaaggctttgtggtaaaagcaaaatcgaaaggcattccgcttggcggtattccttcacctagcactgaacagtctgctaaaaaagtacgcaaaaaggcagaaaacgctcataatacgccgctgcttgtgctatacggttcaaatgcgggaacagctgaaggaacggcgcgtgatttagcagatattgcaatgagcaaaggatttgcaccgcaggtcgcaacgcttgattcacacgccggaaatcttccgcgcgaaggagctgtattaattgtaacggcgtcttataacggtcatccgcctgataacgcaaagcaatttgtcgactggttagaccaagcgtctgctgatgaagtaaaaggcgttcgctactccgtatttggatgcggcgataaaaactgggctgcgacgtatcaaaaagtgcctgcttttatcgatgaaacgcttgccgctaaaggggcagaaaacatcgctgaccgcggtgaagcagatgcaagcgacgactttgaaggcacatatgaagaatggcgtgatcatatgtggagtgacgtagcagcctactttaacctcgacattgaaaacagtgaagataataaatctactctttcacttcaatttgtcgacagcgccgcggatatgccgcttgcgaaaatgcacggtgcgttttcaacgaacgtcgtagcaagcaaagaacttcaacagccaggcagtgcacgaagcacgcgacatcttgaaattgaacttccaaaagaagcttcttatcaagaaggagatcatttaggtgttattcctcgcaactatgaaggaatagtaaaccgtgtaacagcaaggttcggcctaagcgcatcacagcaaatccgtctggaagcagaagaagaaaaattagctcatttgccactcgctaaaacagtatccgtagaagagcttctgcaatacgtggagcttcaagatcctgttacgcgcacgcagcttcgcgcaatggctgctaaaacggtctgcccgccgcataaagtagagcttgaagccttgcttgaaaagcaagcctacaaagaacaagtgctggcaaaacgtttaacaatgcttgaactgcttgaaaaatacccggcgtgtgaaatgaaattcagcgaatttatcgcccttctgccaagcatacgcccgcgctattactcgatttcttcatcacctcgtgtcgatgaaaaacaagcaagcatcacggtcagcgttgtctcaggaccggcgtggagcggatatggagaatataaaggaattgcgtcgaactatcttgccgagctgcaagaaggagatacgattacgtgctttatttccacaccgcagtcagaatttacgctgccaaaagaccctgaaacgccgcttatcatggtcggaccgggaacaggcgtcgcgccgtttagaggctttgtgcaggcgcgcaaacagctaaaagaacaaggacagtcacttggagaagcacatttatacttcggctgccgttcacctcatgaagactatctgtatcaagaagagcttgaaaacgcccaaagcgaaggcatcattacgcttcataccgctttttctcgcatgccaaatcagccgaaaacatacgttcagcacgtaatggaacaagacggcaagaaattgattgaacttcttgatcaaggagcgcacttctatatttgcggagacggaagccaaatggcacctgccgttgaagcaacgcttatgaaaagctatgctgacgttcaccaagtgagtgaagcagacgctcgcttatggctgcagcagctagaagaaaaaggccgatacgcaaaagacgtgtgggctggg

SEQ ID NO: 120 - protein, 1049 aa, synthetic construct
  REGION 1..1049: note = Variant of cytochrome P450
MTIKEMPQPKTFGELKNLPLLNTDKPVQALMRIADELGEIFKFEAPGSVTRFLSSQRLIKEACDESRFDKNLSQALKFARDFLGDGLFTSWTHEPNWKKAHNILGPSFSQRAMKRYHAMMVDIAVQLVQKWERLNADEHIEVSEDMRRLTLDTIGLCGFNYRFNSFYRDQPHPFIVSMVRALDEVMNKLQRANPDDPAYDENKRQCQEDIKVMNDYVDKIIADRKARGEQSHDLLTQMLNGKDPETGEPLDDGNIRYQIITFLIAGHETTSGLLSFALYFLVKNPHVLQKVAEEAARVLVDPVPSYKQVKQLKYVGMVLNEALRLWPTAPLFSLYAKEDTVLGGEYPLTKGDEVMVLIPQLHRDKTIWGDDVEEFRPERFENPSAIPQHAFKPFGNGQRACIGQQFALHEATLVLGMMLKHFDFEDHTNYELVIKETLTLKPEGFVVKAKSKGIPLGGIPSPSTEQSAKKVRKKAENAHNTPLLVLYGSNAGTAEGTARDLADIAMSKGFAPQVATLDSHAGNLPREGAVLIVTASYNGHPPDNAKQFVDWLDQASADEVKGVRYSVFGCGDKNWAATYQKVPAFIDETLAAKGAENIADRGEADASDDFEGTYEEWRDHMWSDVAAYFNLDIENSEDNKSTLSLQFVDSAADMPLAKMHGAFSTNVVASKELQQPGSARSTRHLEIELPKEASYQEGDHLGVIPRNYEGIVNRVTARFGLSASQQIRLEAEEEKLAHLPLAKTVSVEELLQYVELQDPVTRTQLRAMAAKTVCPPHKVELEALLEKQAYKEQVLAKRLTMLELLEKYPACEMKFSEFIALLPSIRPRYYSISSSPRVDEKQASITVSVVSGPAWSGYGEYKGIASNYLAELQEGDTITCFISTPQSEFTLPKDPETPLIMVGPGTGVAPFRGFVQARKQLKEQGQSLGEAHLYFGCRSPHEDYLYQEELENAQSEGIITLHTAFSRMPNQPKTYVQHVMEQDGKKLIELLDQGAHFYICGDGSQMAPAVEATLMKSYADVHQVSEADARLWLQQLEEKGRYAKDVWAG

SEQ ID NO: 121 - DNA, 3147 bp, synthetic construct
  misc_feature 1..3147: note = Variant of cytochrome P450
  source 1..3147: mol_type = other DNA
atgacaattaaggaaatgcctcagcctaagacgtttggagaacttaaaaatttaccgttattaaacacagataaaccggttcaagctttgatgcgtattgcggatgaattaggagaaatctttaaattcgaggcgcctggtagcgtaacgcgctttttatcaagtcagcgtctaattaaagaagcatgcgatgaatcacgctttgataaaaacttaagtcaaggccttaaatttgcacgtgattttcttggagacgggttatttacaagctggacgcatgaaccgaattggaaaaaagcgcataatatcttaggcccaagctttagtcagcgtgcaatgaaacgttatcatgcgatgatggtcgatatcgccgtgcagcttgttcaaaagtgggagcgtctaaatgcagatgagcatattgaagtatcggaagacatgacacgtttaacgcttgatacaattggtctttgcggctttaactatcgctttaacagcttttaccgagatcagcctcatccatttattgtgagtatggtccgtgcactggatgaagtaatgaacaagctgcagcgagcaaatccagacgacccagcttatgatgaaaacaagcgccagtgtcaagaagatatcaaggtgatgaacgactatgtagataaaattattgcagatcgcaaagcaaggggtgaacaaagccatgatttattaacgcagatgctaaacggaaaagatccagaaacgggtgagccgcttgatgacgggaacattcgttatcaaattattacattcttaattgcgggacacgaaacaacaagtggtcttttatcatttgcgctgtatttcttagtgaaaaatccacatgtattacaaaaagtagcagaagaagcagcacgagttctagtagatcctgttccaagctacaaacaagtcaaacagcttaaatatgtcggcatggtcttaaacgaagcgctgcgcttatggccaactgctccagcgttttcgctatatgcaaaagaagatacggtgcttggaggagaatatcctttaaccaaaggcgacgaagtaatggttctgattcctcagcttcaccgtgataaaacaatttggggagacgatgtggaggagttccgtccagagcgttttgaaaatccaagtgcgattccgcagcatgcgtttaaaccgtttggaaacggtcagcgtgcgtgtatcggtaagcagttcgctcttcatgaagcaacgctggtacttggtatgatgctaaaacactttgactttgaagatcatacaaactacgagctcgttattaaagaaaagttaacgttaaaacctgaaggctttgtggtaaaagcaaaatcgaaaggcattccgcttggcggtattccttcacctagcactgaacagtctgctaaaaaagtacgcaaaaaggcagaaaacgctcataatacgccgctgcttgtgctatacggttcaaatgcgggaacagctgaaggaacggcgcgtgatttagcagatattgcaatgagcaaaggatttgcaccgcaggtcgcaacgcttgattcacacgccggaaatcttccgcgcgaaggagctgtattaattgtaacggcgtcttataacggtcatccgcctgataacgcaaagcaatttgtcgactggttagaccaagcgtctgctgatgaagtaaaaggcgttcgctactccgtatttggatgcggcgataaaaactgggctgcgacgtatcaaaaagtgcctgcttttatcgatgaaacgcttgccgctaaaggggcagaaaacatcgctgaccgcggtgaagcagatgcaagcgacgactttgaaggcacatatgaagaatggcgtgatcatatgtggagtgacgtagcagcctactttaacctcgacattgaaaacagtgaagataataaatctactctttcacttcaatttgtcgacagcgccgcggatatgccgcttgcgaaaatgcacggtgcgttttcaacgaacgtcgtagcaagcaaagaacttcaacagccaggcagtgcacgaagcacgcgacatcttgaaattgaacttccaaaagaagcttcttatcaagaaggagatcatttaggtgttattcctcgcaactatgaaggaatagtaaaccgtgtaacagcaaggttcggcctaagcgcatcacagcaaatccgtctggaagcagaagaagaaaaattagctcatttgccactcgctaaaacagtatccgtagaagagcttctgcaatacgtggagcttcaagatcctgttacgcgcacgcagcttcgcgcaatggctgctaaaacggtctgcccgccgcataaagtagagcttgaagccttgcttgaaaagcaagcctacaaagaacaagtgctggcaaaacgtttaacaatgcttgaactgcttgaaaaatacccggcgtgtgaaatgaaattcagcgaatttatcgcccttctgccaagcatacgcccgcgctattactcgatttcttcatcacctcgtgtcgatgaaaaacaagcaagcatcacggtcagcgttgtctcaggaccggcgtggagcggatatggagaatataaaggaattgcgtcgaactatcttgccgagctgcaagaaggagatacgattacgtgctttatttccacaccgcagtcagaatttacgctgccaaaagaccctgaaacgccgcttatcatggtcggaccgggaacaggcgtcgcgccgtttagaggctttgtgcaggcgcgcaaacagctaaaagaacaaggacagtcacttggagaagcacatttatacttcggctgccgttcacctcatgaagactatctgtatcaagaagagcttgaaaacgcccaaagcgaaggcatcattacgcttcataccgctttttctcgcatgccaaatcagccgaaaacatacgttcagcacgtaatggaacaagacggcaagaaattgattgaacttcttgatcaaggagcgcacttctatatttgcggagacggaagccaaatggcacctgccgttgaagcaacgcttatgaaaagctatgctgacgttcaccaagtgagtgaagcagacgctcgcttatggctgcagcagctagaagaaaaaggccgatacgcaaaagacgtgtgggctggg

SEQ ID NO: 122 - protein, 1049 aa, synthetic construct
  REGION 1..1049: note = Variant of cytochrome P450
MTIKEMPQPKTFGELKNLPLLNTDKPVQALMRIADELGEIFKFEAPGSVTRFLSSQRLIKEACDESRFDKNLSQGLKFARDFLGDGLFTSWTHEPNWKKAHNILGPSFSQRAMKRYHAMMVDIAVQLVQKWERLNADEHIEVSEDMTRLTLDTIGLCGFNYRFNSFYRDQPHPFIVSMVRALDEVMNKLQRANPDDPAYDENKRQCQEDIKVMNDYVDKIIADRKARGEQSHDLLTQMLNGKDPETGEPLDDGNIRYQIITFLIAGHETTSGLLSFALYFLVKNPHVLQKVAEEAARVLVDPVPSYKQVKQLKYVGMVLNEALRLWPTAPAFSLYAKEDTVLGGEYPLTKGDEVMVLIPQLHRDKTIWGDDVEEFRPERFENPSAIPQHAFKPFGNGQRACIGKQFALHEATLVLGMMLKHFDFEDHTNYELVIKEKLTLKPEGFVVKAKSKGIPLGGIPSPSTEQSAKKVRKKAENAHNTPLLVLYGSNAGTAEGTARDLADIAMSKGFAPQVATLDSHAGNLPREGAVLIVTASYNGHPPDNAKQFVDWLDQASADEVKGVRYSVFGCGDKNWAATYQKVPAFIDETLAAKGAENIADRGEADASDDFEGTYEEWRDHMWSDVAAYFNLDIENSEDNKSTLSLQFVDSAADMPLAKMHGAFSTNVVASKELQQPGSARSTRHLEIELPKEASYQEGDHLGVIPRNYEGIVNRVTARFGLSASQQIRLEAEEEKLAHLPLAKTVSVEELLQYVELQDPVTRTQLRAMAAKTVCPPHKVELEALLEKQAYKEQVLAKRLTMLELLEKYPACEMKFSEFIALLPSIRPRYYSISSSPRVDEKQASITVSVVSGPAWSGYGEYKGIASNYLAELQEGDTITCFISTPQSEFTLPKDPETPLIMVGPGTGVAPFRGFVQARKQLKEQGQSLGEAHLYFGCRSPHEDYLYQEELENAQSEGIITLHTAFSRMPNQPKTYVQHVMEQDGKKLIELLDQGAHFYICGDGSQMAPAVEATLMKSYADVHQVSEADARLWLQQLEEKGRYAKDVWAG

SEQ ID NO: 123 - DNA, 3147 bp, synthetic construct
  misc_feature 1..3147: note = Variant of cytochrome P450
  source 1..3147: mol_type = other DNA
atgacaattaaggaaatgcctcagcctaagacgtttggagaacttaaaaatttaccgttattaaacacagataaaccggttcaagctttgatgcgtattgcggatgaattaggagaaatctttaaattcgaggcgcctggtagcgtaacgcgctttttatcaagtcagcgtctaattaaagaagcatgcgatgaatcacgctttgataaaaacttaagtcaagcgcttaaatttgcacgtgattttcttggagacgggttatttacaagctggacgcatgaaccgaattggaaaaaagcgcataatatcttaggcccaagctttagtcagcgtgcaatgaaacgttatcatgcgatgatggtcgatatcgccgtgcagcttgttcaaaagtgggagcgtctaaatgcagatgagcatattgaagtatcggaagacatgacacgtttaacgcttgatacaattggtctttgcggcttcaactatcgctttaacagcttttaccgagatcagcctcatccatttattgtgagtatggtccgtgcactggatgaagtagggaacaagctgcagcgagcaaatccagacgacccagcttatgatgaaaacaagcgccagtgtcaagaagatatcaaggtgatgaacgactatgtagataaaattattgcagatcgcaaagcaaggggtgaacaaagccatgatttattaacgcagatgctaaacggaaaagatccagaaacgggtgagccgcttgatgacgggaacattcgttatcaaattattacattcttaattgcgggacacgaaacaacaagtggtcttttatcatttgcgctgtatttcttagtgaaaaatccacatgtattacaaaaagtagcagaagaagcagcacgagttctagtagatcctgttccaagctacaaacaagtcaaacagcttaaatatgtcggcatggtcttaaacgaagcgctgcgcttatggccaactgctccagcgttttcgctatatgcaaaagaagatacggtgcttggaggagaatatcctttaaccaaaggcgacgaagtaatggttctgattcctcagcttcaccgtgataaaacaatttggggagacgatgtggaggagttccgtccagagcgttttgaaaatccaagtgcgattccgcagcatgcgtttaaaccgtttggaaacggtcagcgtgcgtgtatcggtaagcagttcgctcttcatgaagcaacgctggtacttggtatgatgctaaaacactttgactttgaagatcatacaaactacgagctcgttattaaagaaactttaacgttaaaacctgaaggctttgtggtaaaagcaaaatcgaaaggcattccgcttggcggtattccttcacctagcactgaacagtctgctaaaaaagtacgcaaaaaggcagaaaacgctcataatacgccgctgcttgtgctatacggttcaaatgcgggaacagctgaaggaacggcgcgtgatttagcagatattgcaatgagcaaaggatttgcaccgcaggtcgcaacgcttgattcacacgccggaaatcttccgcgcgaaggagctgtattaattgtaacggcgtcttataacggtcatccgcctgataacgcaaagcaatttgtcgactggttagaccaagcgtctgctgatgaagtaaaaggcgttcgctactccgtatttggatgcggcgataaaaactgggctgcgacgtatcaaaaagtgcctgcttttatcgatgaaacgcttgccgctaaaggggcagaaaacatcgctgaccgcggtgaagcagatgcaagcgacgactttgaaggcacatatgaagaatggcgtgatcatatgtggagtgacgtagcagcctactttaacctcgacattgaaaacagtgaagataataaatctactctttcacttcaatttgtcgacagcgccgcggatatgccgcttgcgaaaatgcacggtgcgttttcaacgaacgtcgtagcaagcaaagaacttcaacagccaggcagtgcacgaagcacgcgacatcttgaaattgaacttccaaaagaagcttcttatcaagaaggagatcatttaggtgttattcctcgcaactatgaaggaatagtaaaccgtgtaacagcaaggttcggcctaagcgcatcacagcaaatccgtctggaagcagaagaagaaaaattagctcatttgccactcgctaaaacagtatccgtagaagagcttctgcaatacgtggagcttcaagatcctgttacgcgcacgcagcttcgcgcaatggctgctaaaacggtctgcccgccgcataaagtagagcttgaagccttgcttgaaaagcaagcctacaaagaacaagtgctggcaaaacgtttaacaatgcttgaactgcttgaaaaatacccggcgtgtgaaatgaaattcagcgaatttatcgcccttctgccaagcatacgcccgcgctattactcgatttcttcatcacctcgtgtcgatgaaaaacaagcaagcatcacggtcagcgttgtctcaggaccggcgtggagcggatatggagaatataaaggaattgcgtcgaactatcttgccgagctgcaagaaggagatacgattacgtgctttatttccacaccgcagtcagaatttacgctgccaaaagaccctgaaacgccgcttatcatggtcggaccgggaacaggcgtcgcgccgtttagaggctttgtgcaggcgcgcaaacagctaaaagaacaaggacagtcacttggagaagcacatttatacttcggctgccgttcacctcatgaagactatctgtatcaagaagagcttgaaaacgcccaaagcgaaggcatcattacgcttcataccgctttttctcgcatgccaaatcagccgaaaacatacgttcagcacgtaatggaacaagacggcaagaaattgattgaacttcttgatcaaggagcgcacttctatatttgcggagacggaagccaaatggcacctgccgttgaagcaacgcttatgaaaagctatgctgacgttcaccaagtgagtgaagcagacgctcgcttatggctgcagcagctagaagaaaaaggccgatacgcaaaagacgtgtgggctggg

SEQ ID NO: 124 - protein, 1049 aa, synthetic construct
  REGION 1..1049: note = Variant of cytochrome P450
MTIKEMPQPKTFGELKNLPLLNTDKPVQALMRIADELGEIFKFEAPGSVTRFLSSQRLIKEACDESRFDKNLSQALKFARDFLGDGLFTSWTHEPNWKKAHNILGPSFSQRAMKRYHAMMVDIAVQLVQKWERLNADEHIEVSEDMTRLTLDTIGLCGFNYRFNSFYRDQPHPFIVSMVRALDEVGNKLQRANPDDPAYDENKRQCQEDIKVMNDYVDKIIADRKARGEQSHDLLTQMLNGKDPETGEPLDDGNIRYQIITFLIAGHETTSGLLSFALYFLVKNPHVLQKVAEEAARVLVDPVPSYKQVKQLKYVGMVLNEALRLWPTAPAFSLYAKEDTVLGGEYPLTKGDEVMVLIPQLHRDKTIWGDDVEEFRPERFENPSAIPQHAFKPFGNGQRACIGKQFALHEATLVLGMMLKHFDFEDHTNYELVIKETLTLKPEGFVVKAKSKGIPLGGIPSPSTEQSAKKVRKKAENAHNTPLLVLYGSNAGTAEGTARDLADIAMSKGFAPQVATLDSHAGNLPREGAVLIVTASYNGHPPDNAKQFVDWLDQASADEVKGVRYSVFGCGDKNWAATYQKVPAFIDETLAAKGAENIADRGEADASDDFEGTYEEWRDHMWSDVAAYFNLDIENSEDNKSTLSLQFVDSAADMPLAKMHGAFSTNVVASKELQQPGSARSTRHLEIELPKEASYQEGDHLGVIPRNYEGIVNRVTARFGLSASQQIRLEAEEEKLAHLPLAKTVSVEELLQYVELQDPVTRTQLRAMAAKTVCPPHKVELEALLEKQAYKEQVLAKRLTMLELLEKYPACEMKFSEFIALLPSIRPRYYSISSSPRVDEKQASITVSVVSGPAWSGYGEYKGIASNYLAELQEGDTITCFISTPQSEFTLPKDPETPLIMVGPGTGVAPFRGFVQARKQLKEQGQSLGEAHLYFGCRSPHEDYLYQEELENAQSEGIITLHTAFSRMPNQPKTYVQHVMEQDGKKLIELLDQGAHFYICGDGSQMAPAVEATLMKSYADVHQVSEADARLWLQQLEEKGRYAKDVWAG

SEQ ID NO: 125 - DNA, 3147 bp, synthetic construct
  misc_feature 1..3147: note = Variant of cytochrome P450
  source 1..3147: mol_type = other DNA
atgacaattaaggaaatgcctcagcctaagacgtttggagaacttaaaaatttaccgttattaaacacagataaaccggttcaagctttgatgcgtattgcggatgaattaggagaaatctttaaattcgaggcgcctggtagcgtaacgcgctttttatcaagtcagcgtctaattaaagaagcatgcgatgaatcacgctttgataaaaacttaagtcaagcccttaaatttgcacgtgattttcttggagacgggttatttacaagctggacgcatgaaccgaattggaaaaaagcgcataatatcttaggcccaagctttagtcagcgtgcaatgaaacgttatcatgcgatgatggtcgatatcgccgtgcagcttgttcaaaagtgggagcgtctaaatgcagatgagcatattgaagtatcggaagacatgacacgtttaacgctggatacaattggtctttgcggcttcaactatcgctttaacagcttttaccgagatcagcctcatccatttattgtgagtatggtccgtgcactggatgaagtaatgaacaagctgcagcgagcaaatccagacgacccagcttatgatgaaaacaagcgccagtgtcaagaagatatcaaggtgatgaacgactatgtagataaaattattgcagatcgcaaagcaaggggtgaacaaagccatgatttattaacgcagatgctaaacggaaaagatccagaaacgggtgagccgcttgatgacgggaacattcgttatcaaattattacattcttaattgcgggacacgaaacaacaagtggtcttttatcatttgcgctgtatttcttagtgaaaaatccacatgtattacaaaaagtagcagaagaagcagcacgagttctagtagatcctgttccaagctacaaacaagtcaaacagcttaaatatgtcggcatggtcttaaacgaagcgctgcgcttatggccaactgctcctgcgttttccctatatgcaaaagaagatacggtgcttggaggagaatatcctttaaccaaaggcgacgaagtaatggttctgattcctcagcttcaccgtgataaaacaatttggggagacgatgtggaggagttccgtccagagcgttttgaaaatccaagtgcgattccgcagcatgcgtttaaaccgtttggaaacggtcagcgtgcgtgtatcggtaagcagttcgctcttcatgaagcaacgctggtacttggtatgatgctaaaacactttgactttgaagatcatacaaactacgagctcgttattaaagaaactttaacgttaaaacctgaaggctttgtggtaaaagcaaaatcgaaaggcattccgcttggcggtattccttcacctagcactgaacagtctgctaaaaaagtacgcaaaaaggcagaaaacgctcataatacgccgctgcttgtgctatacggttcaaatgcgggaacagctgaaggaacggcgcgtgatttagcagatattgcaatgagcaaaggatttgcaccgcaggtcgcaacgcttgattcacacgccggaaatcttccgcgcgaaggagctgtattaattgtaacggcgtcttataacggtcatccgcctgataacgcaaagcaatttgtcgactggttagaccaagcgtctgctgatgaagtaaaaggcgttcgctactccgtatttggatgcggcgataaaaactgggctgcgacgtatcaaaaagtgcctgcttttatcgatgaaacgcttgccgctaaaggggcagaaaacatcgctgaccgcggtgaagcagatgcaagcgacgactttgaaggcacatatgaagaatggcgtgatcatatgtggagtgacgtagcagcctactttaacctcgacattgaaaacagtgaagataataaatctactctttcacttcaatttgtcgacagcgccgcggatatgccgcttgcgaaaatgcacggtgcgttttcaacgaacgtcgtagcaagcaaagaacttcaacagccaggcagtgcacgaagcacgcgacatcttgaaattgaacttccaaaagaagcttcttatcaagaaggagatcatttaggtgttattcctcgcaactatgaaggaatagtaaaccgtgtaacagcaaggttcggcctaagcgcatcacagcaaatccgtctggaagcagaagaagaaaaattagctcatttgccactcgctaaaacagtatccgtagaagagcttctgcaatacgtggagcttcaagatcctgttacgcgcacgcagcttcgcgcaatggctgctaaaacggtctgcccgccgcataaagtagagcttgaagccttgcttgaaaagcaagcctacaaagaacaagtgctggcaaaacgtttaacaatgcttgaactgcttgaaaaatacccggcgtgtgaaatgaaattcagcgaatttatcgcccttctgccaagcatacgcccgcgctattactcgatttcttcatcacctcgtgtcgatgaaaaacaagcaagcatcacggtcagcgttgtctcaggaccggcgtggagcggatatggagaatataaaggaattgcgtcgaactatcttgccgagctgcaagaaggagatacgattacgtgctttatttccacaccgcagtcagaatttacgctgccaaaagaccctgaaacgccgcttatcatggtcggaccgggaacaggcgtcgcgccgtttagaggctttgtgcaggcgcgcaaacagctaaaagaacaaggacagtcacttggagaagcacatttatacttcggctgccgttcacctcatgaagactatctgtatcaagaagagcttgaaaacgcccaaagcgaaggcatcattacgcttcataccgctttttctcgcatgccaaatcagccgaaaacatacgttcagcacgtaatggaacaagacggcaagaaattgattgaacttcttgatcaaggagcgcacttctatatttgcggagacggaagccaaatggcacctgccgttgaagcaacgcttatgaaaagctatgctgacgttcaccaagtgagtgaagcagacgctcgcttatggctgcagcagctagaagaaaaaggccgatacgcaaaagacgtgtgggctggg

SEQ ID NO: 126 - protein, 1049 aa, synthetic construct
  REGION 1..1049: note = Variant of cytochrome P450
MTIKEMPQPKTFGELKNLPLLNTDKPVQALMRIADELGEIFKFEAPGSVTRFLSSQRLIKEACDESRFDKNLSQALKFARDFLGDGLFTSWTHEPNWKKAHNILGPSFSQRAMKRYHAMMVDIAVQLVQKWERLNADEHIEVSEDMTRLTLDTIGLCGFNYRFNSFYRDQPHPFIVSMVRALDEVMNKLQRANPDDPAYDENKRQCQEDIKVMNDYVDKIIADRKARGEQSHDLLTQMLNGKDPETGEPLDDGNIRYQIITFLIAGHETTSGLLSFALYFLVKNPHVLQKVAEEAARVLVDPVPSYKQVKQLKYVGMVLNEALRLWPTAPAFSLYAKEDTVLGGEYPLTKGDEVMVLIPQLHRDKTIWGDDVEEFRPERFENPSAIPQHAFKPFGNGQRACIGKQFALHEATLVLGMMLKHFDFEDHTNYELVIKETLTLKPEGFVVKAKSKGIPLGGIPSPSTEQSAKKVRKKAENAHNTPLLVLYGSNAGTAEGTARDLADIAMSKGFAPQVATLDSHAGNLPREGAVLIVTASYNGHPPDNAKQFVDWLDQASADEVKGVRYSVFGCGDKNWAATYQKVPAFIDETLAAKGAENIADRGEADASDDFEGTYEEWRDHMWSDVAAYFNLDIENSEDNKSTLSLQFVDSAADMPLAKMHGAFSTNVVASKELQQPGSARSTRHLEIELPKEASYQEGDHLGVIPRNYEGIVNRVTARFGLSASQQIRLEAEEEKLAHLPLAKTVSVEELLQYVELQDPVTRTQLRAMAAKTVCPPHKVELEALLEKQAYKEQVLAKRLTMLELLEKYPACEMKFSEFIALLPSIRPRYYSISSSPRVDEKQASITVSVVSGPAWSGYGEYKGIASNYLAELQEGDTITCFISTPQSEFTLPKDPETPLIMVGPGTGVAPFRGFVQARKQLKEQGQSLGEAHLYFGCRSPHEDYLYQEELENAQSEGIITLHTAFSRMPNQPKTYVQHVMEQDGKKLIELLDQGAHFYICGDGSQMAPAVEATLMKSYADVHQVSEADARLWLQQLEEKGRYAKDVWAG

SEQ ID NO: 127 - DNA, 3147 bp, synthetic construct
  misc_feature 1..3147: note = Variant of cytochrome P450
  source 1..3147: mol_type = other DNA
atgacaattaaggaaatgcctcagcctaagacgtttggagaacttaaaaatttaccgttattaaacacagataaaccggttcaagctttgatgcgtattgcggatgaattaggagaaatctttaaattcgaggcgcctggtagcgtaacgcgctttttatcaagtcagcgtctaattaaagaagcatgcgatgaatcacgctttgataaaaacttaagtcaaggccttaaatttgcacgtgattttcttggagacgggttatttacaagctggacgcatgaaccgaattggaaaaaagcgcataatatcttaggcccaagctttagtcagcgtgcaatgaaacgttatcatgcgatgatggtcgatatcgccgtgcagcttgttcaaaagtgggagcgtctaaatgcagatgagcatattgaagtatcggaagacatgacacgtttaacgcttgatacaattggtctttgcggcttcaactatcgctttaacagcttttaccgagatcagcctcatccatttattgtgagtatggtccgtgcactggatgaagtaatgaacaagctgcagcgagcaaatccagacgacccagcttatgatgaaaacaagcgccagtgtcaagaagatatcaaggtgatgaacgactatgtagataaaattattgcagatcgcaaagcaaggggtgaacaaagccatgatttattaacgcagatgctaaacggaaaagatccagaaacgggtgagccgcttgatgacgggaacattcgttatcaaattattacattcttaattgcgggacacgaaacaacaagtggtcttttatcatttgcgctgtatttcttagtgaaaaatccacatgtattacaaaaagtagcagaagaagcagcacgagttctagtagatcctgttccaagctacaaacaagtcaaacagcttaaatatgtcggcatggtcttaaacgaagcgctgcgcttatggccaactgctccagcgttttcgctatatgcaaaagaagatacggtgcttggaggagaatatcctttaaccaaaggcgacgaagtaatggttctgattcctcagcttcaccgtgataaaacaatttggggagacgatgtggaggagttccgtccagagcgttttgaaaatccaagtgcgattccgcagcatgcgtttaaaccgtttggaaacggtcagcgtgcgtgtatcggtaagcagttcgctcttcatgaagcaacgctggtacttggtatgatgctaaaacactttgactttgaagatcatacaaactacgagctcgttattaaagaaactttaacgttaaaacctgaaggctttgtggtaaaagcaaaatcgaaaggcattccgcttggcggtattccttcacctagcactgaacagtctgctaaaaaagtacgcaaaaaggcagaaaacgctcataatacgccgctgcttgtgctatacggttcaaatgcgggaacagctgaaggaacggcgcgtgatttagcagatattgcaatgagcaaaggatttgcaccgcaggtcgcaacgcttgattcacacgccggaaatcttccgcgcgaaggagctgtattaattgtaacggcgtcttataacggtcatccgcctgataacgcaaagcaatttgtcgactggttagaccaagcgtctgctgatgaagtaaaaggcgttcgctactccgtatttggatgcggcgataaaaactgggctgcgacgtatcaaaaagtgcctgcttttatcgatgaaacgcttgccgctaaaggggcagaaaacatcgctgaccgcggtgaagcagatgcaagcgacgactttgaaggcacatatgaagaatggcgtgatcatatgtggagtgacgtagcagcctactttaacctcgacattgaaaacagtgaagataataaatctactctttcacttcaatttgtcgacagcgccgcggatatgccgcttgcgaaaatgcacggtgcgttttcaacgaacgtcgtagcaagcaaagaacttcaacagccaggcagtgcacgaagcacgcgacatcttgaaattgaacttccaaaagaagcttcttatcaagaaggagatcatttaggtgttattcctcgcaactatgaaggaatagtaaaccgtgtaacagcaaggttcggcctaagcgcatcacagcaaatccgtctggaagcagaagaagaaaaattagctcatttgccactcgctaaaacagtatccgtagaagagcttctgcaatacgtggagcttcaagatcctgttacgcgcacgcagcttcgcgcaatggctgctaaaacggtctgcccgccgcataaagtagagcttgaagccttgcttgaaaagcaagcctacaaagaacaagtgctggcaaaacgtttaacaatgcttgaactgcttgaaaaatacccggcgtgtgaaatgaaattcagcgaatttatcgcccttctgccaagcatacgcccgcgctattactcgatttcttcatcacctcgtgtcgatgaaaaacaagcaagcatcacggtcagcgttgtctcaggaccggcgtggagcggatatggagaatataaaggaattgcgtcgaactatcttgccgagctgcaagaaggagatacgattacgtgctttatttccacaccgcagtcagaatttacgctgccaaaagaccctgaaacgccgcttatcatggtcggaccgggaacaggcgtcgcgccgtttagaggctttgtgcaggcgcgcaaacagctaaaagaacaaggacagtcacttggagaagcacatttatacttcggctgccgttcacctcatgaagactatctgtatcaagaagagcttgaaaacgcccaaagcgaaggcatcattacgcttcataccgctttttctcgcatgccaaatcagccgaaaacatacgttcagcacgtaatggaacaagacggcaagaaattgattgaacttcttgatcaaggagcgcacttctatatttgcggagacggaagccaaatggcacctgccgttgaagcaacgcttatgaaaagctatgctgacgttcaccaagtgagtgaagcagacgctcgcttatggctgcagcagctagaagaaaaaggccgatacgcaaaagacgtgtgggctggg

SEQ ID NO: 128 - protein, 1049 aa, synthetic construct
  REGION 1..1049: note = Variant of cytochrome P450
MTIKEMPQPKTFGELKNLPLLNTDKPVQALMRIADELGEIFKFEAPGSVTRFLSSQRLIKEACDESRFDKNLSQGLKFARDFLGDGLFTSWTHEPNWKKAHNILGPSFSQRAMKRYHAMMVDIAVQLVQKWERLNADEHIEVSEDMTRLTLDTIGLCGFNYRFNSFYRDQPHPFIVSMVRALDEVMNKLQRANPDDPAYDENKRQCQEDIKVMNDYVDKIIADRKARGEQSHDLLTQMLNGKDPETGEPLDDGNIRYQIITFLIAGHETTSGLLSFALYFLVKNPHVLQKVAEEAARVLVDPVPSYKQVKQLKYVGMVLNEALRLWPTAPAFSLYAKEDTVLGGEYPLTKGDEVMVLIPQLHRDKTIWGDDVEEFRPERFENPSAIPQHAFKPFGNGQRACIGKQFALHEATLVLGMMLKHFDFEDHTNYELVIKETLTLKPEGFVVKAKSKGIPLGGIPSPSTEQSAKKVRKKAENAHNTPLLVLYGSNAGTAEGTARDLADIAMSKGFAPQVATLDSHAGNLPREGAVLIVTASYNGHPPDNAKQFVDWLDQASADEVKGVRYSVFGCGDKNWAATYQKVPAFIDETLAAKGAENIADRGEADASDDFEGTYEEWRDHMWSDVAAYFNLDIENSEDNKSTLSLQFVDSAADMPLAKMHGAFSTNVVASKELQQPGSARSTRHLEIELPKEASYQEGDHLGVIPRNYEGIVNRVTARFGLSASQQIRLEAEEEKLAHLPLAKTVSVEELLQYVELQDPVTRTQLRAMAAKTVCPPHKVELEALLEKQAYKEQVLAKRLTMLELLEKYPACEMKFSEFIALLPSIRPRYYSISSSPRVDEKQASITVSVVSGPAWSGYGEYKGIASNYLAELQEGDTITCFISTPQSEFTLPKDPETPLIMVGPGTGVAPFRGFVQARKQLKEQGQSLGEAHLYFGCRSPHEDYLYQEELENAQSEGIITLHTAFSRMPNQPKTYVQHVMEQDGKKLIELLDQGAHFYICGDGSQMAPAVEATLMKSYADVHQVSEADARLWLQQLEEKGRYAKDVWAG

SEQ ID NO: 129 - DNA, 3147 bp, synthetic construct
  misc_feature 1..3147: note = Variant of cytochrome P450
  source 1..3147: mol_type = other DNA
atgacaattaaggaaatgcctcagcctaagacgtttggagaacttaaaaatttaccgttattaaacacagataaaccggttcaagctttgatgcgtattgcggatgaattaggagaaatctttaaattcgaggcgcctggtagcgtaacgcgctttttatcaagtcagcgtctaattaaagaagcatgcgatgaatcacgctttgataaaaacttaagtcaagcgcttaaatttgcacgtgattttcttggagacgggttatttacaagctggacgcatgaaccgaattggaaaaaagcgcataatatcttaggcccaagctttagtcagcgtgcaatgaaacgttatcatgcgatgatggtcgatatcgccgtgcagcttgttcaaaagtgggagcgtctaaatgcagatgagcatattgaagtatcggaagacatgacgcgtttaacgcttgatacaatcggtctttgcggctttaactatcgctttaacagcttttaccgagatcagcctcatccatttattgtgagtatggtccgtgcactggatgaactgatgaacaagctgcagcgagcaaatccagacgacccagcttatgatgaaaacaagcgccagtgtcaagaagatatcaaggtgatgaacgactatgtagataaaattattgcagatcgcaaagcaaggggtgaacaaagccatgatttattaacgcggatgctaaacggaaaagatccagaaacgggtgagccgcttgatgacgggaatattcgttatcaaatcattacattcttaattgcgggacacgaaacaacaagtggtcttttatcatttgcgctgtatttcttagtgaaaaatccacatgtattacaaaaagtagcagaagaagcagcacgagttctagtagatcctgttccaagctacaaacaagtcaaacagcttaaatatgtcggcatggtcttaaacgaagcgctgcgcttatggccaactgctcctctgttttcgctatatgcaaaagaagatacggtgcttggaggagaatatcctttaaccaaaggcgacgaagtaatggttctgattcctcagcttcaccgtgataaaacaatttggggagacgatgtggaggagttccgtccagagcgttttgaaaatccaagtgcgattccgcagcatgcgtttaaaccgtttggaaacggtcagcgtgcgtgtatcggtcagcagttcgctcttcatgaagcaacgctggtacttggtatgatgctaaaacactttgactttgaagatcatacaaactacgagctcgttgttaaagaaaccttaacgttaaaacctgaaggctttgtggtaaaagcaaaatcgaaaggcattccgcttggcggtattccttcacctagcactgaacagtctgctaaaaaagtacgcaaaaaggcagaaaacgctcataatacgccgctgcttgtgctatacggttcaaatgcgggaacagctgaaggaacggcgcgtgatttagcagatattgcaatgagcaaaggatttgcaccgcaggtcgcaacgcttgattcacacgccggaaatcttccgcgcgaaggagctgtattaattgtaacggcgtcttataacggtcatccgcctgataacgcaaagcaatttgtcgactggttagaccaagcgtctgctgatgaagtaaaaggcgttcgctactccgtatttggatgcggcgataaaaactgggctgcgacgtatcaaaaagtgcctgcttttatcgatgaaacgcttgccgctaaaggggcagaaaacatcgctgaccgcggtgaagcagatgcaagcgacgactttgaaggcacatatgaagaatggcgtgatcatatgtggagtgacgtagcagcctactttaacctcgacattgaaaacagtgaagataataaatctactctttcacttcaatttgtcgacagcgccgcggatatgccgcttgcgaaaatgcacggtgcgttttcaacgaacgtcgtagcaagcaaagaacttcaacagccaggcagtgcacgaagcacgcgacatcttgaaattgaacttccaaaagaagcttcttatcaagaaggagatcatttaggtgttattcctcgcaactatgaaggaatagtaaaccgtgtaacagcaaggttcggcctaagcgcatcacagcaaatccgtctggaagcagaagaagaaaaattagctcatttgccactcgctaaaacagtatccgtagaagagcttctgcaatacgtggagcttcaagatcctgttacgcgcacgcagcttcgcgcaatggctgctaaaacggtctgcccgccgcataaagtagagcttgaagccttgcttgaaaagcaagcctacaaagaacaagtgctggcaaaacgtttaacaatgcttgaactgcttgaaaaatacccggcgtgtgaaatgaaattcagcgaatttatcgcccttctgccaagcatacgcccgcgctattactcgatttcttcatcacctcgtgtcgatgaaaaacaagcaagcatcacggtcagcgttgtctcaggaccggcgtggagcggatatggagaatataaaggaattgcgtcgaactatcttgccgagctgcaagaaggagatacgattacgtgctttatttccacaccgcagtcagaatttacgctgccaaaagaccctgaaacgccgcttatcatggtcggaccgggaacaggcgtcgcgccgtttagaggctttgtgcaggcgcgcaaacagctaaaagaacaaggacagtcacttggagaagcacatttatacttcggctgccgttcacctcatgaagactatctgtatcaagaagagcttgaaaacgcccaaagcgaaggcatcattacgcttcataccgctttttctcgcatgccaaatcagccgaaaacatacgttcagcacgtaatggaacaagacggcaagaaattgattgaacttcttgatcaaggagcgcacttctatatttgcggagacggaagccaaatggcacctgccgttgaagcaacgcttatgaaaagctatgctgacgttcaccaagtgagtgaagcagacgctcgcttatggctgcagcagctagaagaaaaaggccgatacgcaaaagacgtgtgggctggg

SEQ ID NO: 130 - protein, 1049 aa, synthetic construct
  REGION 1..1049: note = Variant of cytochrome P450
MTIKEMPQPKTFGELKNLPLLNTDKPVQALMRIADELGEIFKFEAPGSVTRFLSSQRLIKEACDESRFDKNLSQALKFARDFLGDGLFTSWTHEPNWKKAHNILGPSFSQRAMKRYHAMMVDIAVQLVQKWERLNADEHIEVSEDMTRLTLDTIGLCGFNYRFNSFYRDQPHPFIVSMVRALDELMNKLQRANPDDPAYDENKRQCQEDIKVMNDYVDKIIADRKARGEQSHDLLTRMLNGKDPETGEPLDDGNIRYQIITFLIAGHETTSGLLSFALYFLVKNPHVLQKVAEEAARVLVDPVPSYKQVKQLKYVGMVLNEALRLWPTAPLFSLYAKEDTVLGGEYPLTKGDEVMVLIPQLHRDKTIWGDDVEEFRPERFENPSAIPQHAFKPFGNGQRACIGQQFALHEATLVLGMMLKHFDFEDHTNYELVVKETLTLKPEGFVVKAKSKGIPLGGIPSPSTEQSAKKVRKKAENAHNTPLLVLYGSNAGTAEGTARDLADIAMSKGFAPQVATLDSHAGNLPREGAVLIVTASYNGHPPDNAKQFVDWLDQASADEVKGVRYSVFGCGDKNWAATYQKVPAFIDETLAAKGAENIADRGEADASDDFEGTYEEWRDHMWSDVAAYFNLDIENSEDNKSTLSLQFVDSAADMPLAKMHGAFSTNVVASKELQQPGSARSTRHLEIELPKEASYQEGDHLGVIPRNYEGIVNRVTARFGLSASQQIRLEAEEEKLAHLPLAKTVSVEELLQYVELQDPVTRTQLRAMAAKTVCPPHKVELEALLEKQAYKEQVLAKRLTMLELLEKYPACEMKFSEFIALLPSIRPRYYSISSSPRVDEKQASITVSVVSGPAWSGYGEYKGIASNYLAELQEGDTITCFISTPQSEFTLPKDPETPLIMVGPGTGVAPFRGFVQARKQLKEQGQSLGEAHLYFGCRSPHEDYLYQEELENAQSEGIITLHTAFSRMPNQPKTYVQHVMEQDGKKLIELLDQGAHFYICGDGSQMAPAVEATLMKSYADVHQVSEADARLWLQQLEEKGRYAKDVWAG

SEQ ID NO: 131 - DNA, 3147 bp, synthetic construct
  misc_feature 1..3147: note = Variant of cytochrome P450
  source 1..3147: mol_type = other DNA
atgacaattaaggaaatgcctcagcctaagacgtttggagaacttaaaaatttaccgttattaaacacagataaaccggttcaagctttgatgcgtattgcggatgaattaggagaaatctttaaattcgaggcgcctggtagcgtaacgcgctttttatcaagtcagcgtctaattaaagaagcatgcgatgaatcacgctttgataaaaacttaagtcaagcccttaaatttgcacgtgattttcttggagacgggttatttacaagctggacgcatgaaccgaattggaaaaaagcgcataatatcttaggcccaagctttagtcagcgtgcaatgaaacgttatcatgcgatgatggtcgatatcgccgtgcagcttgttcaaaagtgggagcgtctaaatgcagatgagcatattgaagtatcggaagacatgacacgtttaacgctggatacaattggtctttgcggcttcaactatcgctttaacagcttttaccgagatcagcctcatccatttattgtgagtatgctgcgtgcactggatgaagtaatgaacaagctgcagcgagcaaatccagacgacccagcttatgatgaaaacaagcgccagtgtcaagaagatatcaaggtgatgaacgactatgtagataaaattattgcagatcgcaaagcaaggggtgaacaaagccatgatttattaacgcagatgctaaacggaaaagatccagaaacgggtgagccgcttgatgacgggaacattcgttatcaaattattacattcttaattgcgggacacgaaacaacaagtggtcttttatcatttgcgctgtatttcttagtgaaaaatccacatgtattacaaaaagtagcagaagaagcagcacgagttctagtagatcctgttccaagctacaaacaagtcaaacagcttaaatatgtcggcatggtcttaaacgaagcgctgcgcttatggccaactgctccagcgttttcgctatatgcaaaagaagatacggtgcttggaggagaatatcctttaaccaaaggcgacgaagtaatggttctgattcctcagcttcaccgtgataaaacaatttggggagacgatgtggaggagttccgtccagagcgttttgaaaatccaagtgcgattccgcagcatgcgtttaaaccgtttggaaacggtcagcgtgcgtgtatcggtcagcagttcgctcttcatgaagcaacgctggtacttggtatgatgctaaaacactttgactttgaagatcatacaaactacgagctcgttattaaagaaacgttaacgttaaaacctgaaggctttgtggtaaaagcaaaatcgaaaggcattccgcttggcggtattccttcacctagcactgaacagtctgctaaaaaagtacgcaaaaaggcagaaaacgctcataatacgccgctgcttgtgctatacggttcaaatgcgggaacagctgaaggaacggcgcgtgatttagcagatattgcaatgagcaaaggatttgcaccgcaggtcgcaacgcttgattcacacgccggaaatcttccgcgcgaaggagctgtattaattgtaacggcgtcttataacggtcatccgcctgataacgcaaagcaatttgtcgactggttagaccaagcgtctgctgatgaagtaaaaggcgttcgctactccgtatttggatgcggcgataaaaactgggctgcgacgtatcaaaaagtgcctgcttttatcgatgaaacgcttgccgctaaaggggcagaaaacatcgctgaccgcggtgaagcagatgcaagcgacgactttgaaggcacatatgaagaatggcgtgatcatatgtggagtgacgtagcagcctactttaacctcgacattgaaaacagtgaagataataaatctactctttcacttcaatttgtcgacagcgccgcggatatgccgcttgcgaaaatgcacggtgcgttttcaacgaacgtcgtagcaagcaaagaacttcaacagccaggcagtgcacgaagcacgcgacatcttgaaattgaacttccaaaagaagcttcttatcaagaaggagatcatttaggtgttattcctcgcaactatgaaggaatagtaaaccgtgtaacagcaaggttcggcctaagcgcatcacagcaaatccgtctggaagcagaagaagaaaaattagctcatttgccactcgctaaaacagtatccgtagaagagcttctgcaatacgtggagcttcaagatcctgttacgcgcacgcagcttcgcgcaatggctgctaaaacggtctgcccgccgcataaagtagagcttgaagccttgcttgaaaagcaagcctacaaagaacaagtgctggcaaaacgtttaacaatgcttgaactgcttgaaaaatacccggcgtgtgaaatgaaattcagcgaatttatcgcccttctgccaagcatacgcccgcgctattactcgatttcttcatcacctcgtgtcgatgaaaaacaagcaagcatcacggtcagcgttgtctcaggaccggcgtggagcggatatggagaatataaaggaattgcgtcgaactatcttgccgagctgcaagaaggagatacgattacgtgctttatttccacaccgcagtcagaatttacgctgccaaaagaccctgaaacgccgcttatcatggtcggaccgggaacaggcgtcgcgccgtttagaggctttgtgcaggcgcgcaaacagctaaaagaacaaggacagtcacttggagaagcacatttatacttcggctgccgttcacctcatgaagactatctgtatcaagaagagcttgaaaacgcccaaagcgaaggcatcattacgcttcataccgctttttctcgcatgccaaatcagccgaaaacatacgttcagcacgtaatggaacaagacggcaagaaattgattgaacttcttgatcaaggagcgcacttctatatttgcggagacggaagccaaatggcacctgccgttgaagcaacgcttatgaaaagctatgctgacgttcaccaagtgagtgaagcagacgctcgcttatggctgcagcagctagaagaaaaaggccgatacgcaaaagacgtgtgggctggg

SEQ ID NO: 132 - protein, 1049 aa, synthetic construct
  REGION 1..1049: note = Variant of cytochrome P450
MTIKEMPQPKTFGELKNLPLLNTDKPVQALMRIADELGEIFKFEAPGSVTRFLSSQRLIKEACDESRFDKNLSQALKFARDFLGDGLFTSWTHEPNWKKAHNILGPSFSQRAMKRYHAMMVDIAVQLVQKWERLNADEHIEVSEDMTRLTLDTIGLCGFNYRFNSFYRDQPHPFIVSMLRALDEVMNKLQRANPDDPAYDENKRQCQEDIKVMNDYVDKIIADRKARGEQSHDLLTQMLNGKDPETGEPLDDGNIRYQIITFLIAGHETTSGLLSFALYFLVKNPHVLQKVAEEAARVLVDPVPSYKQVKQLKYVGMVLNEALRLWPTAPAFSLYAKEDTVLGGEYPLTKGDEVMVLIPQLHRDKTIWGDDVEEFRPERFENPSAIPQHAFKPFGNGQRACIGQQFALHEATLVLGMMLKHFDFEDHTNYELVIKETLTLKPEGFVVKAKSKGIPLGGIPSPSTEQSAKKVRKKAENAHNTPLLVLYGSNAGTAEGTARDLADIAMSKGFAPQVATLDSHAGNLPREGAVLIVTASYNGHPPDNAKQFVDWLDQASADEVKGVRYSVFGCGDKNWAATYQKVPAFIDETLAAKGAENIADRGEADASDDFEGTYEEWRDHMWSDVAAYFNLDIENSEDNKSTLSLQFVDSAADMPLAKMHGAFSTNVVASKELQQPGSARSTRHLEIELPKEASYQEGDHLGVIPRNYEGIVNRVTARFGLSASQQIRLEAEEEKLAHLPLAKTVSVEELLQYVELQDPVTRTQLRAMAAKTVCPPHKVELEALLEKQAYKEQVLAKRLTMLELLEKYPACEMKFSEFIALLPSIRPRYYSISSSPRVDEKQASITVSVVSGPAWSGYGEYKGIASNYLAELQEGDTITCFISTPQSEFTLPKDPETPLIMVGPGTGVAPFRGFVQARKQLKEQGQSLGEAHLYFGCRSPHEDYLYQEELENAQSEGIITLHTAFSRMPNQPKTYVQHVMEQDGKKLIELLDQGAHFYICGDGSQMAPAVEATLMKSYADVHQVSEADARLWLQQLEEKGRYAKDVWAG

SEQ ID NO: 133 - DNA, 3147 bp, synthetic construct
  misc_feature 1..3147: note = Variant of cytochrome P450
  source 1..3147: mol_type = other DNA
atgacaattaaggaaatgcctcagcctaagacgtttggagaacttaaaaatttaccgttattaaacacagataaaccggttcaagctttgatgcgtattgcggatgaattaggagaaatctttaaattcgaggcgcctggtagcgtaacgcgctttttatcaagtcagcgtctaattaaagaagcatgcgatgaatcacgctttgataaaaacttaagtcaagcccttaaatttgcacgtgattttcttggagacgggttatttacaagctggacgcatgaaccgaattggaaaaaagcgcataatatcttaggcccaagctttagtcagcgtgcaatgaaacgttatcatgcgatgatggtcgatatcgccgtgcagcttgttcaaaagtgggagcgtctaaatgcagatgagcatattgaagtatcggaagacatgacacgtttaacgctggatacaattggtctttgcggcttcaactatcgctttaacagcttttaccgagatcagcctcatccatttattgtgagtatgctgcgtgcactggatgaagtagggaacaagctgcagcgagcaaatccagacgacccagcttatgatgaaaacaagcgccagtgtcaagaagatatcaaggtgatgaacgactatgtagataaaattattgcagatcgcaaagcaaggggtgaacaaagccatgatttattaacgcagatgctaaacggaaaagatccagaaacgggtgagccgcttgatgacgggaacattcgttatcaaattattacattcttaattgcgggacacgaaacaacaagtggtcttttatcatttgcgctgtatttcttagtgaaaaatccacatgtattacaaaaagtagcagaagaagcagcacgagttctagtagatcctgttccaagctacaaacaagtcaaacagcttaaatatgtcggcatggtcttaaacgaagcgctgcgcttatggccaactgctcctgcgttttccctatatgcaaaagaagatacggtgcttggaggagaatatcctttaaccaaaggcgacgaagtaatggttctgattcctcagcttcaccgtgataaaacaatttggggagacgatgtggaggagttccgtccagagcgttttgaaaatccaagtgcgattccgcagcatgcgtttaaaccgtttggaaacggtcagcgtgcgtgtatcggtcagcagttcgctcttcatgaagcaacgctggtacttggtatgatgctaaaacactttgactttgaagatcatacaaactacgagctcgttattaaagaaaagttaacgttaaaacctgaaggctttgtggtaaaagcaaaatcgaaaggcattccgcttggcggtattccttcacctagcactgaacagtctgctaaaaaagtacgcaaaaaggcagaaaacgctcataatacgccgctgcttgtgctatacggttcaaatgcgggaacagctgaaggaacggcgcgtgatttagcagatattgcaatgagcaaaggatttgcaccgcaggtcgcaacgcttgattcacacgccggaaatcttccgcgcgaaggagctgtattaattgtaacggcgtcttataacggtcatccgcctgataacgcaaagcaatttgtcgactggttagaccaagcgtctgctgatgaagtaaaaggcgttcgctactccgtatttggatgcggcgataaaaactgggctgcgacgtatcaaaaagtgcctgcttttatcgatgaaacgcttgccgctaaaggggcagaaaacatcgctgaccgcggtgaagcagatgcaagcgacgactttgaaggcacatatgaagaatggcgtgatcatatgtggagtgacgtagcagcctactttaacctcgacattgaaaacagtgaagataataaatctactctttcacttcaatttgtcgacagcgccgcggatatgccgcttgcgaaaatgcacggtgcgttttcaacgaacgtcgtagcaagcaaagaacttcaacagccaggcagtgcacgaagcacgcgacatcttgaaattgaacttccaaaagaagcttcttatcaagaaggagatcatttaggtgttattcctcgcaactatgaaggaatagtaaaccgtgtaacagcaaggttcggcctaagcgcatcacagcaaatccgtctggaagcagaagaagaaaaattagctcatttgccactcgctaaaacagtatccgtagaagagcttctgcaatacgtggagcttcaagatcctgttacgcgcacgcagcttcgcgcaatggctgctaaaacggtctgcccgccgcataaagtagagcttgaagccttgcttgaaaagcaagcctacaaagaacaagtgctggcaaaacgtttaacaatgcttgaactgcttgaaaaatacccggcgtgtgaaatgaaattcagcgaatttatcgcccttctgccaagcatacgcccgcgctattactcgatttcttcatcacctcgtgtcgatgaaaaacaagcaagcatcacggtcagcgttgtctcaggaccggcgtggagcggatatggagaatataaaggaattgcgtcgaactatcttgccgagctgcaagaaggagatacgattacgtgctttatttccacaccgcagtcagaatttacgctgccaaaagaccctgaaacgccgcttatcatggtcggaccgggaacaggcgtcgcgccgtttagaggctttgtgcaggcgcgcaaacagctaaaagaacaaggacagtcacttggagaagcacatttatacttcggctgccgttcacctcatgaagactatctgtatcaagaagagcttgaaaacgcccaaagcgaaggcatcattacgcttcataccgctttttctcgcatgccaaatcagccgaaaacatacgttcagcacgtaatggaacaagacggcaagaaattgattgaacttcttgatcaaggagcgcacttctatatttgcggagacggaagccaaatggcacctgccgttgaagcaacgcttatgaaaagctatgctgacgttcaccaagtgagtgaagcagacgctcgcttatggctgcagcagctagaagaaaaaggccgatacgcaaaagacgtgtgggctggg

SEQ ID NO: 134 - protein, 1049 aa, synthetic construct
  REGION 1..1049: note = Variant of cytochrome P450
MTIKEMPQPKTFGELKNLPLLNTDKPVQALMRIADELGEIFKFEAPGSVTRFLSSQRLIKEACDESRFDKNLSQALKFARDFLGDGLFTSWTHEPNWKKAHNILGPSFSQRAMKRYHAMMVDIAVQLVQKWERLNADEHIEVSEDMTRLTLDTIGLCGFNYRFNSFYRDQPHPFIVSMLRALDEVGNKLQRANPDDPAYDENKRQCQEDIKVMNDYVDKIIADRKARGEQSHDLLTQMLNGKDPETGEPLDDGNIRYQIITFLIAGHETTSGLLSFALYFLVKNPHVLQKVAEEAARVLVDPVPSYKQVKQLKYVGMVLNEALRLWPTAPAFSLYAKEDTVLGGEYPLTKGDEVMVLIPQLHRDKTIWGDDVEEFRPERFENPSAIPQHAFKPFGNGQRACIGQQFALHEATLVLGMMLKHFDFEDHTNYELVIKEKLTLKPEGFVVKAKSKGIPLGGIPSPSTEQSAKKVRKKAENAHNTPLLVLYGSNAGTAEGTARDLADIAMSKGFAPQVATLDSHAGNLPREGAVLIVTASYNGHPPDNAKQFVDWLDQASADEVKGVRYSVFGCGDKNWAATYQKVPAFIDETLAAKGAENIADRGEADASDDFEGTYEEWRDHMWSDVAAYFNLDIENSEDNKSTLSLQFVDSAADMPLAKMHGAFSTNVVASKELQQPGSARSTRHLEIELPKEASYQEGDHLGVIPRNYEGIVNRVTARFGLSASQQIRLEAEEEKLAHLPLAKTVSVEELLQYVELQDPVTRTQLRAMAAKTVCPPHKVELEALLEKQAYKEQVLAKRLTMLELLEKYPACEMKFSEFIALLPSIRPRYYSISSSPRVDEKQASITVSVVSGPAWSGYGEYKGIASNYLAELQEGDTITCFISTPQSEFTLPKDPETPLIMVGPGTGVAPFRGFVQARKQLKEQGQSLGEAHLYFGCRSPHEDYLYQEELENAQSEGIITLHTAFSRMPNQPKTYVQHVMEQDGKKLIELLDQGAHFYICGDGSQMAPAVEATLMKSYADVHQVSEADARLWLQQLEEKGRYAKDVWAG

SEQ ID NO: 135 - DNA, 3147 bp, synthetic construct
  misc_feature 1..3147: note = Variant of cytochrome P450
  source 1..3147: mol_type = other DNA
atgacaattaaggaaatgcctcagcctaagacgtttggagaacttaaaaatttaccgttattaaacacagataaaccggttcaagctttgatgcgtattgcggatgaattaggagaaatctttaaattcgaggcgcctggtagcgtaacgcgctttttatcaagtcagcgtctaattaaagaagcatgcgatgaatcacgctttgataaaaacttaagtcaagcccttaaatttgcacgtgattttcttggagacgggttatttacaagctggacgcatgaaccgaattggaaaaaagcgcataatatcttaggcccaagctttagtcagcgtgcaatgaaacgttatcatgcgatgatggtcgatatcgccgtgcagcttgttcaaaagtgggagcgtctaaatgcagatgagcatattgaagtatcggaagacatgacacgtttaacgcttgatacaattggtctttgcggctttaactatcgctttaacagcttttaccgagatcagcctcatccatttattgtgagtatgctgcgtgcactggatgaagtaatgaacaagctgcagcgagcaaatccagacgacccagcttatgatgaaaacaagcgccagtgtcaagaagatatcaaggtgatgaacgactatgtagataaaattattgcagatcgcaaagcaaggggtgaacaaagccatgatttattaacgcagatgctaaacggaaaagatccagaaacgggtgagccgcttgatgacgggaacattcgttatcaaattattacattcttaattgcgggacacgaaacaacaagtggtcttttatcatttgcgctgtatttcttagtgaaaaatccacatgtattacaaaaagtagcagaagaagcagcacgagttctagtagatcctgttccaagctacaaacaagtcaaacagcttaaatatgtcggcatggtcttaaacgaagcgctgcgcttatggccaactgctccagcgttttcgctatatgcaaaagaagatacggtgcttggaggagaatatcctttaaccaaaggcgacgaagtaatggttctgattcctcagcttcaccgtgataaaacaatttggggagacgatgtggaggagttccgtccagagcgttttgaaaatccaagtgcgattccgcagcatgcgtttaaaccgtttggaaacggtcagcgtgcgtgtatcggtaagcagttcgctcttcatgaagcaacgctggtacttggtatgatgctaaaacactttgactttgaagatcatacaaactacgagctcgttattaaagaaacgttaacgttaaaacctgaaggctttgtggtaaaagcaaaatcgaaaggcattccgcttggcggtattccttcacctagcactgaacagtctgctaaaaaagtacgcaaaaaggcagaaaacgctcataatacgccgctgcttgtgctatacggttcaaatgcgggaacagctgaaggaacggcgcgtgatttagcagatattgcaatgagcaaaggatttgcaccgcaggtcgcaacgcttgattcacacgccggaaatcttccgcgcgaaggagctgtattaattgtaacggcgtcttataacggtcatccgcctgataacgcaaagcaatttgtcgactggttagaccaagcgtctgctgatgaagtaaaaggcgttcgctactccgtatttggatgcggcgataaaaactgggctgcgacgtatcaaaaagtgcctgcttttatcgatgaaacgcttgccgctaaaggggcagaaaacatcgctgaccgcggtgaagcagatgcaagcgacgactttgaaggcacatatgaagaatggcgtgatcatatgtggagtgacgtagcagcctactttaacctcgacattgaaaacagtgaagataataaatctactctttcacttcaatttgtcgacagcgccgcggatatgccgcttgcgaaaatgcacggtgcgttttcaacgaacgtcgtagcaagcaaagaacttcaacagccaggcagtgcacgaagcacgcgacatcttgaaattgaacttccaaaagaagcttcttatcaagaaggagatcatttaggtgttattcctcgcaactatgaaggaatagtaaaccgtgtaacagcaaggttcggcctaagcgcatcacagcaaatccgtctggaagcagaagaagaaaaattagctcatttgccactcgctaaaacagtatccgtagaagagcttctgcaatacgtggagcttcaagatcctgttacgcgcacgcagcttcgcgcaatggctgctaaaacggtctgcccgccgcataaagtagagcttgaagccttgcttgaaaagcaagcctacaaagaacaagtgctggcaaaacgtttaacaatgcttgaactgcttgaaaaatacccggcgtgtgaaatgaaattcagcgaatttatcgcccttctgccaagcatacgcccgcgctattactcgatttcttcatcacctcgtgtcgatgaaaaacaagcaagcatcacggtcagcgttgtctcaggaccggcgtggagcggatatggagaatataaaggaattgcgtcgaactatcttgccgagctgcaagaaggagatacgattacgtgctttatttccacaccgcagtcagaatttacgctgccaaaagaccctgaaacgccgcttatcatggtcggaccgggaacaggcgtcgcgccgtttagaggctttgtgcaggcgcgcaaacagctaaaagaacaaggacagtcacttggagaagcacatttatacttcggctgccgttcacctcatgaagactatctgtatcaagaagagcttgaaaacgcccaaagcgaaggcatcattacgcttcataccgctttttctcgcatgccaaatcagccgaaaacatacgttcagcacgtaatggaacaagacggcaagaaattgattgaacttcttgatcaaggagcgcacttctatatttgcggagacggaagccaaatggcacctgccgttgaagcaacgcttatgaaaagctatgctgacgttcaccaagtgagtgaagcagacgctcgcttatggctgcagcagctagaagaaaaaggccgatacgcaaaagacgtgtgggctggg

SEQ ID NO: 136 - protein, 1049 aa, synthetic construct
  REGION 1..1049: note = Variant of cytochrome P450
MTIKEMPQPKTFGELKNLPLLNTDKPVQALMRIADELGEIFKFEAPGSVTRFLSSQRLIKEACDESRFDKNLSQALKFARDFLGDGLFTSWTHEPNWKKAHNILGPSFSQRAMKRYHAMMVDIAVQLVQKWERLNADEHIEVSEDMTRLTLDTIGLCGFNYRFNSFYRDQPHPFIVSMLRALDEVMNKLQRANPDDPAYDENKRQCQEDIKVMNDYVDKIIADRKARGEQSHDLLTQMLNGKDPETGEPLDDGNIRYQIITFLIAGHETTSGLLSFALYFLVKNPHVLQKVAEEAARVLVDPVPSYKQVKQLKYVGMVLNEALRLWPTAPAFSLYAKEDTVLGGEYPLTKGDEVMVLIPQLHRDKTIWGDDVEEFRPERFENPSAIPQHAFKPFGNGQRACIGKQFALHEATLVLGMMLKHFDFEDHTNYELVIKETLTLKPEGFVVKAKSKGIPLGGIPSPSTEQSAKKVRKKAENAHNTPLLVLYGSNAGTAEGTARDLADIAMSKGFAPQVATLDSHAGNLPREGAVLIVTASYNGHPPDNAKQFVDWLDQASADEVKGVRYSVFGCGDKNWAATYQKVPAFIDETLAAKGAENIADRGEADASDDFEGTYEEWRDHMWSDVAAYFNLDIENSEDNKSTLSLQFVDSAADMPLAKMHGAFSTNVVASKELQQPGSARSTRHLEIELPKEASYQEGDHLGVIPRNYEGIVNRVTARFGLSASQQIRLEAEEEKLAHLPLAKTVSVEELLQYVELQDPVTRTQLRAMAAKTVCPPHKVELEALLEKQAYKEQVLAKRLTMLELLEKYPACEMKFSEFIALLPSIRPRYYSISSSPRVDEKQASITVSVVSGPAWSGYGEYKGIASNYLAELQEGDTITCFISTPQSEFTLPKDPETPLIMVGPGTGVAPFRGFVQARKQLKEQGQSLGEAHLYFGCRSPHEDYLYQEELENAQSEGIITLHTAFSRMPNQPKTYVQHVMEQDGKKLIELLDQGAHFYICGDGSQMAPAVEATLMKSYADVHQVSEADARLWLQQLEEKGRYAKDVWAG

SEQ ID NO: 137 - DNA, 3147 bp, synthetic construct
  misc_feature 1..3147: note = Variant of cytochrome P450
  source 1..3147: mol_type = other DNA
atgacaattaaggaaatgcctcagcctaagacgtttggagaacttaaaaatttaccgttattaaacacagataaaccggttcaagctttgatgcgtattgcggatgaattaggagaaatctttaaattcgaggcgcctggtagcgtaacgcgctttttatcaagtcagcgtctaattaaagaagcatgcgatgaatcacgctttgataaaaacttaagtcaagcccttaaatttgcacgtgattttcttggagacgggttatttacaagctggacgcatgaaccgaattggaaaaaagcgcataatatcttaggcccaagctttagtcagcgtgcaatgaaacgttatcatgcgatgatggtcgatatcgccgtgcagcttgttcaaaagtgggagcgtctaaatgcagatgagcatattgaagtatcggaagacatgacacgtttaacgcttgatacaattggtctttgcggcttcaactatcgctttaacagcttttaccgagatcagcctcatccatttattgtgagtatgctgcgtgcactggatgaagtagggaacaagctgcagcgagcaaatccagacgacccagcttatgatgaaaacaagcgccagtgtcaagaagatatcaaggtgatgaacgactatgtagataaaattattgcagatcgcaaagcaaggggtgaacaaagccatgatttattaacgcagatgctaaacggaaaagatccagaaacgggtgagccgcttgatgacgggaacattcgttatcaaattattacattcttaattgcgggacacgaaacaacaagtggtcttttatcatttgcgctgtatttcttagtgaaaaatccacatgtattacaaaaagtagcagaagaagcagcacgagttctagtagatcctgttccaagctacaaacaagtcaaacagcttaaatatgtcggcatggtcttaaacgaagcgctgcgcttatggccaactgctccagcgttttcgctatatgcaaaagaagatacggtgcttggaggagaatatcctttaaccaaaggcgacgaagtaatggttctgattcctcagcttcaccgtgataaaacaatttggggagacgatgtggaggagttccgtccagagcgttttgaaaatccaagtgcgattccgcagcatgcgtttaaaccgtttggaaacggtcagcgtgcgtgtatcggtcagcagttcgctcttcatgaagcaacgctggtacttggtatgatgctaaaacactttgactttgaagatcatacaaactacgagctcgttattaaagaaactttaacgttaaaacctgaaggctttgtggtaaaagcaaaatcgaaaggcattccgcttggcggtattccttcacctagcactgaacagtctgctaaaaaagtacgcaaaaaggcagaaaacgctcataatacgccgctgcttgtgctatacggttcaaatgcgggaacagctgaaggaacggcgcgtgatttagcagatattgcaatgagcaaaggatttgcaccgcaggtcgcaacgcttgattcacacgccggaaatcttccgcgcgaaggagctgtattaattgtaacggcgtcttataacggtcatccgcctgataacgcaaagcaatttgtcgactggttagaccaagcgtctgctgatgaagtaaaaggcgttcgctactccgtatttggatgcggcgataaaaactgggctgcgacgtatcaaaaagtgcctgcttttatcgatgaaacgcttgccgctaaaggggcagaaaacatcgctgaccgcggtgaagcagatgcaagcgacgactttgaaggcacatatgaagaatggcgtgatcatatgtggagtgacgtagcagcctactttaacctcgacattgaaaacagtgaagataataaatctactctttcacttcaatttgtcgacagcgccgcggatatgccgcttgcgaaaatgcacggtgcgttttcaacgaacgtcgtagcaagcaaagaacttcaacagccaggcagtgcacgaagcacgcgacatcttgaaattgaacttccaaaagaagcttcttatcaagaaggagatcatttaggtgttattcctcgcaactatgaaggaatagtaaaccgtgtaacagcaaggttcggcctaagcgcatcacagcaaatccgtctggaagcagaagaagaaaaattagctcatttgccactcgctaaaacagtatccgtagaagagcttctgcaatacgtggagcttcaagatcctgttacgcgcacgcagcttcgcgcaatggctgctaaaacggtctgcccgccgcataaagtagagcttgaagccttgcttgaaaagcaagcctacaaagaacaagtgctggcaaaacgtttaacaatgcttgaactgcttgaaaaatacccggcgtgtgaaatgaaattcagcgaatttatcgcccttctgccaagcatacgcccgcgctattactcgatttcttcatcacctcgtgtcgatgaaaaacaagcaagcatcacggtcagcgttgtctcaggaccggcgtggagcggatatggagaatataaaggaattgcgtcgaactatcttgccgagctgcaagaaggagatacgattacgtgctttatttccacaccgcagtcagaatttacgctgccaaaagaccctgaaacgccgcttatcatggtcggaccgggaacaggcgtcgcgccgtttagaggctttgtgcaggcgcgcaaacagctaaaagaacaaggacagtcacttggagaagcacatttatacttcggctgccgttcacctcatgaagactatctgtatcaagaagagcttgaaaacgcccaaagcgaaggcatcattacgcttcataccgctttttctcgcatgccaaatcagccgaaaacatacgttcagcacgtaatggaacaagacggcaagaaattgattgaacttcttgatcaaggagcgcacttctatatttgcggagacggaagccaaatggcacctgccgttgaagcaacgcttatgaaaagctatgctgacgttcaccaagtgagtgaagcagacgctcgcttatggctgcagcagctagaagaaaaaggccgatacgcaaaagacgtgtgggctggg

SEQ ID NO: 138 - protein, 1049 aa, synthetic construct
  REGION 1..1049: note = Variant of cytochrome P450
MTIKEMPQPKTFGELKNLPLLNTDKPVQALMRIADELGEIFKFEAPGSVTRFLSSQRLIKEACDESRFDKNLSQALKFARDFLGDGLFTSWTHEPNWKKAHNILGPSFSQRAMKRYHAMMVDIAVQLVQKWERLNADEHIEVSEDMTRLTLDTIGLCGFNYRFNSFYRDQPHPFIVSMLRALDEVGNKLQRANPDDPAYDENKRQCQEDIKVMNDYVDKIIADRKARGEQSHDLLTQMLNGKDPETGEPLDDGNIRYQIITFLIAGHETTSGLLSFALYFLVKNPHVLQKVAEEAARVLVDPVPSYKQVKQLKYVGMVLNEALRLWPTAPAFSLYAKEDTVLGGEYPLTKGDEVMVLIPQLHRDKTIWGDDVEEFRPERFENPSAIPQHAFKPFGNGQRACIGQQFALHEATLVLGMMLKHFDFEDHTNYELVIKETLTLKPEGFVVKAKSKGIPLGGIPSPSTEQSAKKVRKKAENAHNTPLLVLYGSNAGTAEGTARDLADIAMSKGFAPQVATLDSHAGNLPREGAVLIVTASYNGHPPDNAKQFVDWLDQASADEVKGVRYSVFGCGDKNWAATYQKVPAFIDETLAAKGAENIADRGEADASDDFEGTYEEWRDHMWSDVAAYFNLDIENSEDNKSTLSLQFVDSAADMPLAKMHGAFSTNVVASKELQQPGSARSTRHLEIELPKEASYQEGDHLGVIPRNYEGIVNRVTARFGLSASQQIRLEAEEEKLAHLPLAKTVSVEELLQYVELQDPVTRTQLRAMAAKTVCPPHKVELEALLEKQAYKEQVLAKRLTMLELLEKYPACEMKFSEFIALLPSIRPRYYSISSSPRVDEKQASITVSVVSGPAWSGYGEYKGIASNYLAELQEGDTITCFISTPQSEFTLPKDPETPLIMVGPGTGVAPFRGFVQARKQLKEQGQSLGEAHLYFGCRSPHEDYLYQEELENAQSEGIITLHTAFSRMPNQPKTYVQHVMEQDGKKLIELLDQGAHFYICGDGSQMAPAVEATLMKSYADVHQVSEADARLWLQQLEEKGRYAKDVWAG

SEQ ID NO: 139 - DNA, 3147 bp, synthetic construct
  misc_feature 1..3147: note = Variant of cytochrome P450
  source 1..3147: mol_type = other DNA
atgacaattaaggaaatgcctcagcctaagacgtttggagaacttaaaaatttaccgttattaaacacagataaaccggttcaagctttgatgcgtattgcggatgaattaggagaaatctttaaattcgaggcgcctggtagcgtaacgcgctttttatcaagtcagcgtctaattaaagaagcatgcgatgaatcacgctttgataaaaacttaagtcaagcccttaaatttgcacgtgattttcttggagacgggttatttacaagctggacgcatgaaccgaattggaaaaaagcgcataatatcttaggcccaagctttagtcagcgtgcaatgaaacgttatcatgcgatgatggtcgatatcgccgtgcagcttgttcaaaagtgggagcgtctaaatgcagatgagcatattgaagtatcggaagacatgacgcgtttaacgctggatacaattggtctttgcggcttcaactatcgctttaacagcttttaccgagatcagcctcatccatttattgtgagtatggtgcgtgcactggatgaagtaatgaacaagctgcagcgagcaaatccagacgacccagcttatgatgaaaacaagcgccagtgtcaagaagatatcaaggtgatgaacgactatgtcgataaaattattgcagatcgcaaagcaaggggtgaacaaagccatgatttattaacgcagatgctaaacggaaaagatccagaaacgggtgagccgcttgatgacgggaacattcgttatcaaattattacattcttaattgcgggacacgaaacaacaagtggtcttttatcatttgcgctgtatttcttagtgaaaaatccacatgtattacaaaaagtagcagaagaagcagcacgagttctagtagatcctgttccaagctacaaacaagtcaaacagcttaaatatgtcggcatggtcttaaacgaagcgctgcgcttatggccaactgctcctgcgttttccctatatgcaaaagaagatacggtgcttggaggagaatatcctttaaccaaaggcgacgaagtaatggttctgattcctcagcttcaccgtgataaaacaatttggggagacgatgtggaggagttccgtccagagcgttttgaaaatccaagtgcgattccgcagcatgcgtttaaaccgtttggaaacggtcagcgtgcgtgtatcggtcagcagttcgctcttcatgaagcaacgctggtacttggtatgatgctaaaacactttgactttgaagatcatacaaactacgagctcgttattaaagaaaagttaacgttaaaacctgaaggctttgtggtaaaagcaaaatcgaaaggcattccgcttggcggtattccttcacctagcactgaacagtctgctaaaaaagtacgcaaaaaggcagaaaacgctcataatacgccgctgcttgtgctatacggttcaaatgcgggaacagctgaaggaacggcgcgtgatttagcagatattgcaatgagcaaaggatttgcaccgcaggtcgcaacgcttgattcacacgccggaaatcttccgcgcgaaggagctgtattaattgtaacggcgtcttataacggtcatccgcctgataacgcaaagcaatttgtcgactggttagaccaagcgtctgctgatgaagtaaaaggcgttcgctactccgtatttggatgcggcgataaaaactgggctgcgacgtatcaaaaagtgcctgcttttatcgatgaaacgcttgccgctaaaggggcagaaaacatcgctgaccgcggtgaagcagatgcaagcgacgactttgaaggcacatatgaagaatggcgtgatcatatgtggagtgacgtagcagcctactttaacctcgacattgaaaacagtgaagataataaatctactctttcacttcaatttgtcgacagcgccgcggatatgccgcttgcgaaaatgcacggtgcgttttcaacgaacgtcgtagcaagcaaagaacttcaacagccaggcagtgcacgaagcacgcgacatcttgaaattgaacttccaaaagaagcttcttatcaagaaggagatcatttaggtgttattcctcgcaactatgaaggaatagtaaaccgtgtaacagcaaggttcggcctaagcgcatcacagcaaatccgtctggaagcagaagaagaaaaattagctcatttgccactcgctaaaacagtatccgtagaagagcttctgcaatacgtggagcttcaagatcctgttacgcgcacgcagcttcgcgcaatggctgctaaaacggtctgcccgccgcataaagtagagcttgaagccttgcttgaaaagcaagcctacaaagaacaagtgctggcaaaacgtttaacaatgcttgaactgcttgaaaaatacccggcgtgtgaaatgaaattcagcgaatttatcgcccttctgccaagcatacgcccgcgctattactcgatttcttcatcacctcgtgtcgatgaaaaacaagcaagcatcacggtcagcgttgtctcaggaccggcgtggagcggatatggagaatataaaggaattgcgtcgaactatcttgccgagctgcaagaaggagatacgattacgtgctttatttccacaccgcagtcagaatttacgctgccaaaagaccctgaaacgccgcttatcatggtcggaccgggaacaggcgtcgcgccgtttagaggctttgtgcaggcgcgcaaacagctaaaagaacaaggacagtcacttggagaagcacatttatacttcggctgccgttcacctcatgaagactatctgtatcaagaagagcttgaaaacgcccaaagcgaaggcatcattacgcttcataccgctttttctcgcatgccaaatcagccgaaaacatacgttcagcacgtaatggaacaagacggcaagaaattgattgaacttcttgatcaaggagcgcacttctatatttgcggagacggaagccaaatggcacctgccgttgaagcaacgcttatgaaaagctatgctgacgttcaccaagtgagtgaagcagacgctcgcttatggctgcagcagctagaagaaaaaggccgatacgcaaaagacgtgtgggctggg

SEQ ID NO: 140 - protein, 1049 aa, synthetic construct; identical to SEQ ID NO: 102
  REGION 1..1049: note = Variant of cytochrome P450

SEQ ID NO: 141 - DNA, 3147 bp, synthetic construct
  misc_feature 1..3147: note = Variant of cytochrome P450
  source 1..3147: mol_type = other DNA
atgacaattaaggaaatgcctcagcctaagacgtttggagaacttaaaaatttaccgttattaaacacagataaaccggttcaagctttgatgcgtattgcggatgaattaggagaaatctttaaattcgaggcgcctggtagcgtaacgcgctttttatcaagtcagcgtctaattaaagaagcatgcgatgaatcacgctttgataaaaacttaagtcaaggccttaaatttgcacgtgattttcttggagacgggttatttacaagctggacgcatgaaccgaattggaaaaaagcgcataatatcttaggcccaagctttagtcagcgtgcaatgaaacgttatcatgcgatgatggtcgatatcgccgtgcagcttgttcaaaagtgggagcgtctaaatgcagatgagcatattgaagtatcggaagacatgacacgtttaacgctggatacaattggtctttgcggcttcaactatcgctttaacagcttttaccgagatcagcctcatccatttattgtgagtgttgtgcgtgcactggatgaagtaatgaacaagctgcagcgagcaaatccagacgacccagcttatgatgaaaacaagcgccagtgtcaagaagatatcaaggtgatgaacgactatgtcgataaaattattgcagatcgcaaagcaaggggtgaacaaagccatgatttattaacgcagatgctaaacggaaaagatccagaaacgggtgagccgcttgatgacgggaacattcgttatcaaattattacattcttaattgcgggacacgaaacaacaagtggtcttttatcatttgcgctgtatttcttagtgaaaaatccacatgtattacaaaaagtagcagaagaagcagcacgagttctagtagatcctgttccaagctacaaacaagtcaaacagcttaaatatgtcggcatggtcttaaacgaagcgctgcgcttatggccaactgctcctgcgttttccctatatgcaaaagaagatacggtgcttggaggagaatatcctttaaccaaaggcgacgaagtaatggttctgattcctcagcttcaccgtgataaaacaatttggggagacgatgtggaggagttccgtccagagcgttttgaaaatccaagtgcgattccgcagcatgcgtttaaaccgtttggaaacggtcagcgtgcgtgtatcggtcagcagttcgctcttcatgaagcaacgctggtacttggtatgatgctaaaacactttgactttgaagatcatacaaactacgagctcgttattaaagaaaagttaacgttaaaacctgaaggctttgtggtaaaagcaaaatcgaaaggcattccgcttggcggtattccttcacctagcactgaacagtctgctaaaaaagtacgcaaaaaggcagaaaacgctcataatacgccgctgcttgtgctatacggttcaaatgcgggaacagctgaaggaacggcgcgtgatttagcagatattgcaatgagcaaaggatttgcaccgcaggtcgcaacgcttgattcacacgccggaaatcttccgcgcgaaggagctgtattaattgtaacggcgtcttataacggtcatccgcctgataacgcaaagcaatttgtcgactggttagaccaagcgtctgctgatgaagtaaaaggcgttcgctactccgtatttggatgcggcgataaaaactgggctgcgacgtatcaaaaagtgcctgcttttatcgatgaaacgcttgccgctaaaggggcagaaaacatcgctgaccgcggtgaagcagatgcaagcgacgactttgaaggcacatatgaagaatggagtgatcatatgtggagtgacgtagcagcctactttaacctcgacattgaaaacagtgaagataataaatctactctttcacttcaatttgtcgacagcgccgcggatatgccgcttgcgaaaatgcacggtgcgttttcaacgaacgtcgtagcaagcaaagaacttcaacagccaggcagtgcacgaagcacgcgacatcttgaaattgaacttccaaaagaagcttcttatcaagaaggagatcatttaggtgttattcctcgcaactatgaaggaatagtaaaccgtgtaacagcaaggttcggcctaagcgcatcacagcaaatccgtctggaagcagaagaagaaaaattagctcatttgccactcgctaaaacagtatccgtagaagagcttctgcaatacgtggagcttcaagatcctgttacgcgcacgcagcttcgcgcaatggctgctaaaacggtctgcccgccgcataaagtagagcttgaagccttgcttgaaaagcaagcctacaaagaacaagtgctggcaaaacgtttaacaatgcttgaactgcttgaaaaatacccggcgtgtgaaatgaaattcagcgaatttatcgcccttctgccaagcatacgcccgcgctattactcgatttcttcatcacctcgtgtcgatgaaaaacaagcaagcatcacggtcagcgttgtctcaggaccggcgtggagcggatatggagaatataaaggaattgcgtcgaactatcttgccgagctgcaagaaggagatacgattacgtgctttatttccacaccgcagtcagaatttacgctgccaaaagaccctgaaacgccgcttatcatggtcggaccgggaacaggcgtcgcgccgtttagaggctttgtgcaggcgcgcaaacagctaaaagaacaaggacagtcacttggagaagcacatttatacttcggctgccgttcacctcatgaagactatctgtatcaagaagagcttgaaaacgcccaaagcgaaggcatcattacgcttcataccgctttttctcgcatgccaaatcagccgaaaacatacgttcagcacgtaatggaacaagacggcaagaaattgattgaacttcttgatcaaggagcgcacttctatatttgcggagacggaagccaaatggcacctgccgttgaagcaacgcttatgaaaagctatgctgacgttcaccaagtgagtgaagcagacgctcgcttatggctgcagcagctagaagaaaaaggccgatacgcaaaagacgtgtgggctggg

SEQ ID NO: 142 - protein, 1049 aa, synthetic construct
  REGION 1..1049: note = Variant of cytochrome P450
MTIKEMPQPKTFGELKNLPLLNTDKPVQALMRIADELGEIFKFEAPGSVTRFLSSQRLIKEACDESRFDKNLSQGLKFARDFLGDGLFTSWTHEPNWKKAHNILGPSFSQRAMKRYHAMMVDIAVQLVQKWERLNADEHIEVSEDMTRLTLDTIGLCGFNYRFNSFYRDQPHPFIVSVVRALDEVMNKLQRANPDDPAYDENKRQCQEDIKVMNDYVDKIIADRKARGEQSHDLLTQMLNGKDPETGEPLDDGNIRYQIITFLIAGHETTSGLLSFALYFLVKNPHVLQKVAEEAARVLVDPVPSYKQVKQLKYVGMVLNEALRLWPTAPAFSLYAKEDTVLGGEYPLTKGDEVMVLIPQLHRDKTIWGDDVEEFRPERFENPSAIPQHAFKPFGNGQRACIGQQFALHEATLVLGMMLKHFDFEDHTNYELVIKEKLTLKPEGFVVKAKSKGIPLGGIPSPSTEQSAKKVRKKAENAHNTPLLVLYGSNAGTAEGTARDLADIAMSKGFAPQVATLDSHAGNLPREGAVLIVTASYNGHPPDNAKQFVDWLDQASADEVKGVRYSVFGCGDKNWAATYQKVPAFIDETLAAKGAENIADRGEADASDDFEGTYEEWSDHMWSDVAAYFNLDIENSEDNKSTLSLQFVDSAADMPLAKMHGAFSTNVVASKELQQPGSARSTRHLEIELPKEASYQEGDHLGVIPRNYEGIVNRVTARFGLSASQQIRLEAEEEKLAHLPLAKTVSVEELLQYVELQDPVTRTQLRAMAAKTVCPPHKVELEALLEKQAYKEQVLAKRLTMLELLEKYPACEMKFSEFIALLPSIRPRYYSISSSPRVDEKQASITVSVVSGPAWSGYGEYKGIASNYLAELQEGDTITCFISTPQSEFTLPKDPETPLIMVGPGTGVAPFRGFVQARKQLKEQGQSLGEAHLYFGCRSPHEDYLYQEELENAQSEGIITLHTAFSRMPNQPKTYVQHVMEQDGKKLIELLDQGAHFYICGDGSQMAPAVEATLMKSYADVHQVSEADARLWLQQLEEKGRYAKDVWAG

SEQ ID NO: 143 - DNA, 3147 bp, synthetic construct
  misc_feature 1..3147: note = Variant of cytochrome P450
  source 1..3147: mol_type = other DNA
atgacaattaaggaaatgcctcagcctaagacgtttggagaacttaaaaatttaccgttattaaacacagataaaccggttcaagctttgatgcgtattgcggatgaattaggagaaatctttaaattcgaggcgcctggtagcgtaacgcgctttttatcaagtcagcgtctaattaaagaagcatgcgatgaatcacgctttgataaaaacttaagtcaaggccttaaatttgcacgtgattttcttggagacgggttatttacaagctggacgcatgaaccgaattggaaaaaagcgcataatatcttaggcccaagctttagtcagcgtgcaatgaaacgttatcatgcgatgatggtcgatatcgccgtgcagcttgttcaaaagtgggagcgtctaaatgcagatgagcatattgaagtatcggaagacatgacacgtttaacgctggatacaattggtctttgcggcttcaactatcgctttaacagcttttaccgagatcagcctcatccatttattgtgagtatggtgcgtgcactggatgaagtaatgaacaagctgcagcgagcaaatccagacgacccagcttatgatgaaaacaagcgccagtgtcaagaagatatcaaggtgctgaacgactatgtcgataaaattattgcagatcgcaaagcaaggggtgaacaaagccatgatttattaacgcagatgctaaacggaaaagatccagaaacgggtgagccgcttgatgacgggaacattcgttatcaaattattacattcttaattgcgggacacgaaacaacaagtggtcttttatcatttgcgctgtatttcttagtgaaaaatccacatgtattacaaaaagtagcagaagaagcagcacgagttctagtagatcctgttccaagctacaaacaagtcaaacagcttaaatatgtcggcatggtcttaaacgaagcgctgcgcttatggccaactgctcctgcgttttccctatatgcaaaagaagatacggtgcttggaggagaatatcctttaaccaaaggcgacgaagtaatggttctgattcctcagcttcaccgtgataaaacaatttggggagacgatgtggaggagttccgtccagagcgttttgaaaatccaagtgcgattccgcagcatgcgtttaaaccgtttggaaacggtcagcgtgcgtgtatcggtcagcagttcgctcttcatgaagcaacgctggtacttggtatgatgctaaaacactttgactttgaagatcatacaaactacgagctcgttattaaagaaaagttaacgttaaaacctgaaggctttgtggtaaaagcaaaatcgaaaggcattccgcttggcggtattccttcacctagcactgaacagtctgctaaaaaagtacgcaaaaaggcagaaaacgctcataatacgccgctgcttgtgctatacggttcaaatgcgggaacagctgaaggaacggcgcgtgatttagcagatattgcaatgagcaaaggatttgcaccgcaggtcgcaacgcttgattcacacgccggaaatcttccgcgcgaaggagctgtattaattgtaacggcgtcttataacggtcatccgcctgataacgcaaagcaatttgtcgactggttagaccaagcgtctgctgatgaagtaaaaggcgttcgctactccgtatttggatgcggcgataaaaactgggctgcgacgtatcaaaaagtgcctgcttttatcgatgaaacgcttgccgctaaaggggcagaaaacatcgctgaccgcggtgaagcagatgcaagcgacgactttgaaggcacatatgaagaatggcgtgatcatatgtggagtgacgtagcagcctactttaacctcgacattgaaaacagtgaagataataaatctactctttcacttcaatttgtcgacagcgccgcggatatgccgcttgcgaaaatgcacggtgcgttttcaacgaacgtcgtagcaagcaaagaacttcaacagccaggcagtgcacgaagcacgcgacatcttgaaattgaacttccaaaagaagcttcttatcaagaaggagatcatttaggtgttattcctcgcaactatgaaggaatagtaaaccgtgtaacagcaaggttcggcctaagcgcatcacagcaaatccgtctggaagcagaagaagaaaaattagctcatttgccactcgctaaaacagtatccgtagaagagcttctgcaatacgtggagcttcaagatcctgttacgcgcacgcagcttcgcgcaatggctgctaaaacggtctgcccgccgcataaagtagagcttgaagccttgcttgaaaagcaagcctacaaagaacaagtgctggcaaaacgtttaacaatgcttgaactgcttgaaaaatacccggcgtgtgaaatgaaattcagcgaatttatcgcccttctgccaagcatacgcccgcgctattactcgatttcttcatcacctcgtgtcgatgaaaaacaagcaagcatcacggtcagcgttgtctcaggaccggcgtggagcggatatggagaatataaaggaattgcgtcgaactatcttgccgagctgcaagaaggagatacgattacgtgctttatttccacaccgcagtcagaatttacgctgccaaaagaccctgaaacgccgcttatcatggtcggaccgggaacaggcgtcgcgccgtttagaggctttgtgcaggcgcgcaaacagctaaaagaacaaggacagtcacttggagaagcacatttatacttcggctgccgttcacctcatgaagactatctgtatcaagaagagcttgaaaacgcccaaagcgaaggcatcattacgcttcataccgctttttctcgcatgccaaatcagccgaaaacatacgttcagcacgtaatggaacaagacggcaagaaattgattgaacttcttgatcaaggagcgcacttctatatttgcggagacggaagccaaatggcacctgccgttgaagcaacgcttatgaaaagctatgctgacgttcaccaagtgagtgaagcagacgctcgcttatggctgcagcagctagaagaaaaaggccgatacgcaaaagacgtgtgggctggg

SEQ ID NO: 144 - protein, 1049 aa, synthetic construct
  REGION 1..1049: note = Variant of cytochrome P450
MTIKEMPQPKTFGELKNLPLLNTDKPVQALMRIADELGEIFKFEAPGSVTRFLSSQRLIKEACDESRFDKNLSQGLKFARDFLGDGLFTSWTHEPNWKKAHNILGPSFSQRAMKRYHAMMVDIAVQLVQKWERLNADEHIEVSEDMTRLTLDTIGLCGFNYRFNSFYRDQPHPFIVSMVRALDEVMNKLQRANPDDPAYDENKRQCQEDIKVLNDYVDKIIADRKARGEQSHDLLTQMLNGKDPETGEPLDDGNIRYQIITFLIAGHETTSGLLSFALYFLVKNPHVLQKVAEEAARVLVDPVPSYKQVKQLKYVGMVLNEALRLWPTAPAFSLYAKEDTVLGGEYPLTKGDEVMVLIPQLHRDKTIWGDDVEEFRPERFENPSAIPQHAFKPFGNGQRACIGQQFALHEATLVLGMMLKHFDFEDHTNYELVIKEKLTLKPEGFVVKAKSKGIPLGGIPSPSTEQSAKKVRKKAENAHNTPLLVLYGSNAGTAEGTARDLADIAMSKGFAPQVATLDSHAGNLPREGAVLIVTASYNGHPPDNAKQFVDWLDQASADEVKGVRYSVFGCGDKNWAATYQKVPAFIDETLAAKGAENIADRGEADASDDFEGTYEEWRDHMWSDVAAYFNLDIENSEDNKSTLSLQFVDSAADMPLAKMHGAFSTNVVASKELQQPGSARSTRHLEIELPKEASYQEGDHLGVIPRNYEGIVNRVTARFGLSASQQIRLEAEEEKLAHLPLAKTVSVEELLQYVELQDPVTRTQLRAMAAKTVCPPHKVELEALLEKQAYKEQVLAKRLTMLELLEKYPACEMKFSEFIALLPSIRPRYYSISSSPRVDEKQASITVSVVSGPAWSGYGEYKGIASNYLAELQEGDTITCFISTPQSEFTLPKDPETPLIMVGPGTGVAPFRGFVQARKQLKEQGQSLGEAHLYFGCRSPHEDYLYQEELENAQSEGIITLHTAFSRMPNQPKTYVQHVMEQDGKKLIELLDQGAHFYICGDGSQMAPAVEATLMKSYADVHQVSEADARLWLQQLEEKGRYAKDVWAG

SEQ ID NO: 145 - DNA, 3147 bp, synthetic construct
  misc_feature 1..3147: note = Variant of cytochrome P450
  source 1..3147: mol_type = other DNA
atgacaattaaggaaatgcctcagcctaagacgtttggagaacttaaaaatttaccgttattaaacacagataaaccggttcaagctttgatgcgtattgcggatgaattaggagaaatctttaaattcgaggcgcctggtagcgtaacgcgctttttatcaagtcagcgtctaattaaagaagcatgcgatgaatcacgctttgataaaaacttaagtcaaggccttaaatttgcacgtgattttcttggagacgggttatttacaagctggacgcatgaaccgaattggaaaaaagcgcataatatcttaggcccaagctttagtcagcgtgcaatgaaacgttatcatgcgatgatggtcgatatcgccgtgcagcttgttcaaaagtgggagcgtctaaatgcagatgagcatattgaagtatcggaagacatgacacgtttaacgctggatacaattggtctttgcggcttcaactatcgctttaacagcttttaccgagatcagcctcatccatttattgtgagtatggtgcgtgcactggatgaagtaatgaacaagctgcagcgagcaaatccagacgacccagcttatgatgaaaacaagcgccagtgtcaagaagatatcaaggtgatgaacgactatgtcgataaaattattgcagatcgcaaagcaaggggtgaacaaagccatgatttattaacgcagatgctaaacggaaaagatccagaaacgggtgagccgcttgatgacgggaacattcgttatcaagttattacattcttaattgcgggacacgaaacaacaagtggtcttttatcatttgcgctgtatttcttagtgaaaaatccacatgtattacaaaaagtagcagaagaagcagcacgagttctagtagatcctgttccaagctacaaacaagtcaaacagcttaaatatgtcggcatggtcttaaacgaagcgctgcgcttatggccaactgctcctgcgttttccctatatgcaaaagaagatacggtgcttggaggagaatatcctttaaccaaaggcgacgaagtaatggttctgattcctcagcttcaccgtgataaaacaatttggggagacgatgtggaggagttccgtccagagcgttttgaaaatccaagtgcgattccgcagcatgcgtttaaaccgtttggaaacggtcagcgtgcgtgtatcggtcagcagttcgctcttcatgaagcaacgctggtacttggtatgatgctaaaacactttgactttgaagatcatacaaactacgagctcgttattaaagaaaagttaacgttaaaacctgaaggctttgtggtaaaagcaaaatcgaaaggcattccgcttggcggtattccttcacctagcactgaacagtctgctaaaaaagtacgcaaaaaggcagaaaacgctcataatacgccgctgcttgtgctatacggttcaaatgcgggaacagctgaaggaacggcgcgtgatttagcagatattgcaatgagcaaaggatttgcaccgcaggtcgcaacgcttgattcacacgccggaaatcttccgcgcgaaggagctgtattaattgtaacggcgtcttataacggtcatccgcctgataacgcaaagcaatttgtcgactggttagaccaagcgtctgctgatgaagtaaaaggcgttcgctactccgtatttggatgcggcgataaaaactgggctgcgacgtatcaaaaagtgcctgcttttatcgatgaaacgcttgccgctaaaggggcagaaaacatcgctgaccgcggtgaagcagatgcaagcgacgactttgaaggcacatatgaagaatggcgtgatcatatgtggagtgacgtagcagcctactttaacctcgacattgaaaacagtgaagataataaatctactctttcacttcaatttgtcgacagcgccgcggatatgccgcttgcgaaaatgcacggtgcgttttcaacgaacgtcgtagcaagcaaagaacttcaacagccaggcagtgcacgaagcacgcgacatcttgaaattgaacttccaaaagaagcttcttatcaagaaggagatcatttaggtgttattcctcgcaactatgaaggaatagtaaaccgtgtaacagcaaggttcggcctaagcgcatcacagcaaatccgtctggaagcagaagaagaaaaattagctcatttgccactcgctaaaacagtatccgtagaagagcttctgcaatacgtggagcttcaagatcctgttacgcgcacgcagcttcgcgcaatggctgctaaaacggtctgcccgccgcataaagtagagcttgaagccttgcttgaaaagcaagcctacaaagaacaagtgctggcaaaacgtttaacaatgcttgaactgcttgaaaaatacccggcgtgtgaaatgaaattcagcgaatttatcgcccttctgccaagcatacgcccgcgctattactcgatttcttcatcacctcgtgtcgatgaaaaacaagcaagcatcacggtcagcgttgtctcaggaccggcgtggagcggatatggagaatataaaggaattgcgtcgaactatcttgccgagctgcaagaaggagatacgattacgtgctttatttccacaccgcagtcagaatttacgctgccaaaagaccctgaaacgccgcttatcatggtcggaccgggaacaggcgtcgcgccgtttagaggctttgtgcaggcgcgcaaacagctaaaagaacaaggacagtcacttggagaagcacatttatacttcggctgccgttcacctcatgaagactatctgtatcaagaagagcttgaaaacgcccaaagcgaaggcatcattacgcttcataccgctttttctcgcatgccaaatcagccgaaaacatacgttcagcacgtaatggaacaagacggcaagaaattgattgaacttcttgatcaaggagcgcacttctatatttgcggagacggaagccaaatggcacctgccgttgaagcaacgcttatgaaaagctatgctgacgttcaccaagtgagtgaagcagacgctcgcttatggctgcagcagctagaagaaaaaggccgatacgcaaaagacgtgtgggctggg

SEQ ID NO: 146 - protein, 1049 aa, synthetic construct
  REGION 1..1049: note = Variant of cytochrome P450
MTIKEMPQPKTFGELKNLPLLNTDKPVQALMRIADELGEIFKFEAPGSVTRFLSSQRLIKEACDESRFDKNLSQGLKFARDFLGDGLFTSWTHEPNWKKAHNILGPSFSQRAMKRYHAMMVDIAVQLVQKWERLNADEHIEVSEDMTRLTLDTIGLCGFNYRFNSFYRDQPHPFIVSMVRALDEVMNKLQRANPDDPAYDENKRQCQEDIKVMNDYVDKIIADRKARGEQSHDLLTQMLNGKDPETGEPLDDGNIRYQVITFLIAGHETTSGLLSFALYFLVKNPHVLQKVAEEAARVLVDPVPSYKQVKQLKYVGMVLNEALRLWPTAPAFSLYAKEDTVLGGEYPLTKGDEVMVLIPQLHRDKTIWGDDVEEFRPERFENPSAIPQHAFKPFGNGQRACIGQQFALHEATLVLGMMLKHFDFEDHTNYELVIKEKLTLKPEGFVVKAKSKGIPLGGIPSPSTEQSAKKVRKKAENAHNTPLLVLYGSNAGTAEGTARDLADIAMSKGFAPQVATLDSHAGNLPREGAVLIVTASYNGHPPDNAKQFVDWLDQASADEVKGVRYSVFGCGDKNWAATYQKVPAFIDETLAAKGAENIADRGEADASDDFEGTYEEWRDHMWSDVAAYFNLDIENSEDNKSTLSLQFVDSAADMPLAKMHGAFSTNVVASKELQQPGSARSTRHLEIELPKEASYQEGDHLGVIPRNYEGIVNRVTARFGLSASQQIRLEAEEEKLAHLPLAKTVSVEELLQYVELQDPVTRTQLRAMAAKTVCPPHKVELEALLEKQAYKEQVLAKRLTMLELLEKYPACEMKFSEFIALLPSIRPRYYSISSSPRVDEKQASITVSVVSGPAWSGYGEYKGIASNYLAELQEGDTITCFISTPQSEFTLPKDPETPLIMVGPGTGVAPFRGFVQARKQLKEQGQSLGEAHLYFGCRSPHEDYLYQEELENAQSEGIITLHTAFSRMPNQPKTYVQHVMEQDGKKLIELLDQGAHFYICGDGSQMAPAVEATLMKSYADVHQVSEADARLWLQQLEEKGRYAKDVWAG

SEQ ID NO: 147 - DNA, 3147 bp, synthetic construct
  misc_feature 1..3147: note = Variant of cytochrome P450
  source 1..3147: mol_type = other DNA
atgacaattaaggaaatgcctcagcctaagacgtttggagaacttaaaaatttaccgttattaaacacagataaaccggttcaagctttgatgcgtattgcggatgaattaggagaaatctttaaattcgaggcgcctggtagcgtaacgcgctttttatcaagtcagcgtctaattaaagaagcatgcgatgaatcacgctttgataaaaacttaagtcaaggccttaaatttgcacgtgattttcttggagacgggttatttacaagctggacgcatgaaccgaattggaaaaaagcgcataatatcttaggcccaagctttagtcagcgtgcaatgaaacgttatcatgcgatgatggtcgatatcgccgtgcagcttgttcaaaagtgggagcgtctaaatgcagatgagcatattgaagtatcggaagacatgacacgtttaacgctggatacaattggtctttgcggcttcaactatcgctttaacagcttttaccgagatcagcctcatccatttattgtgagtatggtgcgtgcactggatgaagtaatgaacaagctgcagcgagcaaatccagacgacccagcttatgatgaaaacaagcgccagtgtcaagaagctatcaaggtgatgaacgactatgtcgataaaattattgcagatcgcaaagcaaggggtgaacaaagccatgatttattaacgcagatgctaaacggaaaagatccagaaacgggtgagccgcttgatgacgggaacattcgttatcaaattattacattcttaattgcgggacacgaaacaacaagtggtcttttatcatttgcgctgtatttcttagtgaaaaatccacatgtattacaaaaagtagcagaagaagcagcacgagttctagtagatcctgttccaagctacaaacaagtcaaacagcttaaatatgtcggcatggtcttaaacgaagcgctgcgcttatggccaactgctcctgcgttttccctatatgcaaaagaagatacggtgcttggaggagaatatcctttaaccaaaggcgacgaagtaatggttctgattcctcagcttcaccgtgataaaacaatttggggagacgatgtggaggagttccgtccagagcgttttgaaaatccaagtgcgattccgcagcatgcgtttaaaccgtttggaaacggtcagcgtgcgtgtatcggtcagcagttcgctcttcatgaagcaacgctggtacttggtatgatgctaaaacactttgactttgaagatcatacaaactacgagctcgttattaaagaaaagttaacgttaaaacctgaaggctttgtggtaaaagcaaaatcgaaaggcattccgcttggcggtattccttcacctagcactgaacagtctgctaaaaaagtacgcaaaaaggcagaaaacgctcataatacgccgctgcttgtgctatacggttcaaatgcgggaacagctgaaggaacggcgcgtgatttagcagatattgcaatgagcaaaggatttgcaccgcaggtcgcaacgcttgattcacacgccggaaatcttccgcgcgaaggagctgtattaattgtaacggcgtcttataacggtcatccgcctgataacgcaaagcaatttgtcgactggttagaccaagcgtctgctgatgaagtaaaaggcgttcgctactccgtatttggatgcggcgataaaaactgggctgcgacgtatcaaaaagtgcctgcttttatcgatgaaacgcttgccgctaaaggggcagaaaacatcgctgaccgcggtgaagcagatgcaagcgacgactttgaaggcacatatgaagaatggcgtgatcatatgtggagtgacgtagcagcctactttaacctcgacattgaaaacagtgaagataataaatctactctttcacttcaatttgtcgacagcgccgcggatatgccgcttgcgaaaatgcacggtgcgttttcaacgaacgtcgtagcaagcaaagaacttcaacagccaggcagtgcacgaagcacgcgacatcttgaaattgaacttccaaaagaagcttcttatcaagaaggagatcatttaggtgttattcctcgcaactatgaaggaatagtaaaccgtgtaacagcaaggttcggcctaagcgcatcacagcaaatccgtctggaagcagaagaagaaaaattagctcatttgccactcgctaaaacagtatccgtagaagagcttctgcaatacgtggagcttcaagatcctgttacgcgcacgcagcttcgcgcaatggctgctaaaacggtctgcccgccgcataaagtagagcttgaagccttgcttgaaaagcaagcctacaaagaacaagtgctggcaaaacgtttaacaatgcttgaactgcttgaaaaatacccggcgtgtgaaatgaaattcagcgaatttatcgcccttctgccaagcatacgcccgcgctattactcgatttcttcatcacctcgtgtcgatgaaaaacaagcaagcatcacggtcagcgttgtctcaggaccggcgtggagcggatatggagaatataaaggaattgcgtcgaactatcttgccgagctgcaagaaggagatacgattacgtgctttatttccacaccgcagtcagaatttacgctgccaaaagaccctgaaacgccgcttatcatggtcggaccgggaacaggcgtcgcgccgtttagaggctttgtgcaggcgcgcaaacagctaaaagaacaaggacagtcacttggagaagcacatttatacttcggctgccgttcacctcatgaagactatctgtatcaagaagagcttgaaaacgcccaaagcgaaggcatcattacgcttcataccgctttttctcgcatgccaaatcagccgaaaacatacgttcagcacgtaatggaacaagacggcaagaaattgattgaacttcttgatcaaggagcgcacttctatatttgcggagacggaagccaaatggcacctgccgttgaagcaacgcttatgaaaagctatgctgacgttcaccaagtgagtgaagcagacgctcgcttatggctgcagcagctagaagaaaaaggccgatacgcaaaagacgtgtgggctggg

SEQ ID NO: 148 - protein, 1049 aa, synthetic construct
  REGION 1..1049: note = Variant of cytochrome P450
MTIKEMPQPKTFGELKNLPLLNTDKPVQALMRIADELGEIFKFEAPGSVTRFLSSQRLIKEACDESRFDKNLSQGLKFARDFLGDGLFTSWTHEPNWKKAHNILGPSFSQRAMKRYHAMMVDIAVQLVQKWERLNADEHIEVSEDMTRLTLDTIGLCGFNYRFNSFYRDQPHPFIVSMVRALDEVMNKLQRANPDDPAYDENKRQCQEAIKVMNDYVDKIIADRKARGEQSHDLLTQMLNGKDPETGEPLDDGNIRYQIITFLIAGHETTSGLLSFALYFLVKNPHVLQKVAEEAARVLVDPVPSYKQVKQLKYVGMVLNEALRLWPTAPAFSLYAKEDTVLGGEYPLTKGDEVMVLIPQLHRDKTIWGDDVEEFRPERFENPSAIPQHAFKPFGNGQRACIGQQFALHEATLVLGMMLKHFDFEDHTNYELVIKEKLTLKPEGFVVKAKSKGIPLGGIPSPSTEQSAKKVRKKAENAHNTPLLVLYGSNAGTAEGTARDLADIAMSKGFAPQVATLDSHAGNLPREGAVLIVTASYNGHPPDNAKQFVDWLDQASADEVKGVRYSVFGCGDKNWAATYQKVPAFIDETLAAKGAENIADRGEADASDDFEGTYEEWRDHMWSDVAAYFNLDIENSEDNKSTLSLQFVDSAADMPLAKMHGAFSTNVVASKELQQPGSARSTRHLEIELPKEASYQEGDHLGVIPRNYEGIVNRVTARFGLSASQQIRLEAEEEKLAHLPLAKTVSVEELLQYVELQDPVTRTQLRAMAAKTVCPPHKVELEALLEKQAYKEQVLAKRLTMLELLEKYPACEMKFSEFIALLPSIRPRYYSISSSPRVDEKQASITVSVVSGPAWSGYGEYKGIASNYLAELQEGDTITCFISTPQSEFTLPKDPETPLIMVGPGTGVAPFRGFVQARKQLKEQGQSLGEAHLYFGCRSPHEDYLYQEELENAQSEGIITLHTAFSRMPNQPKTYVQHVMEQDGKKLIELLDQGAHFYICGDGSQMAPAVEATLMKSYADVHQVSEADARLWLQQLEEKGRYAKDVWAG

SEQ ID NO: 149 - DNA, 3147 bp, synthetic construct
  misc_feature 1..3147: note = Variant of cytochrome P450
  source 1..3147: mol_type = other DNA
atgacaattaaggaaatgcctcagcctaagacgtttggagaacttaaaaatttaccgttattaaacacagataaaccggttcaagctttgatgcgtattgcggatgaattaggagaaatctttaaattcgaggcgcctggtagcgtaacgcgctttttatcaagtcagcgtctaattaaagaagcatgcgatgaatcacgctttgataaaaacttaagtcaaggccttaaatttgcacgtgattttcttggagacgggttatttacaagctggacgcatgaaccgaattggaaaaaagcgcataatatcttaggcccaagctttagtcagcgtgcaatgaaacgttatcatgcgatgatggtcgatatcgccgtgcagcttgttcaaaagtgggagcgtctaaatgcagatgagcatattgaagtatcggaagacatgacacgtttaacgctggatacaattggtctttgcggcttcaactatcgctttaacagcttttaccgagatcagcctcatccatttattgtgagtgttgtgcgtgcactggatgaagtaatgaacaagctgcagcgagcaaatccagacgacccagcttatgatgaaaacaagcgccagtgtcaagaagatatcaaggtgatgaacgactatgtcgataaaattattgcagatcgcaaagcaaggggtgaacaaagccatgatttattaacgcagatgctaaacggaaaagatccagaaacgggtgagccgcttgatgacgggaacattcgttatcaaattattacattcttaattgcgggacacgaaacaacaagtggtcttttatcatttgcgctgtatttcttagtgaaaaatccacatgtattacaaaaagtagcagaagaagcagcacgagttctagtagatcctgttccaagctacaaacaagtcaaacagcttaaatatgtcggcatggtcttaaacgaagcgctgcgcttatggccaactgctcctgcgttttccctatatgcaaaagaagatacggtgcttggaggagaatatcctttaaccaaaggcgacgaagtaatggttctgattcctcagcttcaccgtgataaaacaatttggggagacgatgtggaggagttccgtccagagcgttttgaaaatccaagtgcgattccgcagcatgcgtttaaaccgtttggaaacggtcagcgtgcgtgtatcggtcagcagttcgctcttcatgaagcaacgctggtacttggtatgatgctaaaacactttgactttgaagatcatacaaactacgagctcgttattaaagaaaagttaacgttaaaacctgaaggctttgtggtaaaagcaaaatcgaaaggcattccgcttggcggtattccttcacctagcactgaacagtctgctaaaaaagtacgcaaaaaggcagaaaacgctcataatacgccgctgcttgtgctatacggttcaaatgcgggaacagctgaaggaacggcgcgtgatttagcagatattgcaatgagcaaaggatttgcaccgcaggtcgcaacgcttgattcacacgccggaaatcttccgcgcgaaggagctgtattaattgtaacggcgtcttataacggtcatccgcctgataacgcaaagcaatttgtcgactggttagaccaagcgtctgctgatgaagtaaaaggcgttcgctactccgtatttggatgcggcgataaaaactgggctgcgacgtatcaaaaagtgcctgcttttatcgatgaaacgcttgccgctaaaggggcagaaaacatcgctgaccgcggtgaagcagatgcaagcgacgactttgaaggcacatatgaagaatggcgtgatcatatgtggagtgacgtagcagcctactttaacctcgacattgaaaacagtgaagataataaatctactctttcacttcaatttgtcgacagcgccgcggatatgccgcttgcgaaaatgcacggtgcgttttcaacgaacgtcgtagcaagcaaagaacttcaacagccaggcagtgcacgaagcacgcgacatcttgaaattgaacttccaaaagaagcttcttatcaagaaggagatcatttaggtgttattcctcgcaactatgaaggaatagtaaaccgtgtaacagcaaggttcggcctaagcgcatcacagcaaatccgtctggaagcagaagaagaaaaattagctcatttgccactcgctaaaacagtatccgtagaagagcttctgcaatacgtggagcttcaagatcctgttacgcgcacgcagcttcgcgcaatggctgctaaaacggtctgcccgccgcataaagtagagcttgaagccttgcttgaaaagcaagcctacaaagaacaagtgctggcaaaacgtttaacaatgcttgaactgcttgaaaaatacccggcgtgtgaaatgaaattcagcgaatttatcgcccttctgccaagcatacgcccgcgctattactcgatttcttcatcacctcgtgtcgatgaaaaacaagcaagcatcacggtcagcgttgtctcaggaccggcgtggagcggatatggagaatataaaggaattgcgtcgaactatcttgccgagctgcaagaaggagatacgattacgtgctttatttccacaccgcagtcagaatttacgctgccaaaagaccctgaaacgccgcttatcatggtcggaccgggaacaggcgtcgcgccgtttagaggctttgtgcaggcgcgcaaacagctaaaagaacaaggacagtcacttggagaagcacatttatacttcggctgccgttcacctcatgaagactatctgtatcaagaagagcttgaaaacgcccaaagcgaaggcatcattacgcttcataccgctttttctcgcatgccaaatcagccgaaaacatacgttcagcacgtaatggaacaagacggcaagaaattgattgaacttcttgatcaaggagcgcacttctatatttgcggagacggaagccaaatggcacctgccgttgaagcaacgcttatgaaaagctatgctgacgttcaccaagtgagtgaagcagacgctcgcttatggctgcagcagctagaagaaaaaggccgatacgcaaaagacgtgtgggctggg

SEQ ID NO: 150 - protein, 1049 aa, synthetic construct
  REGION 1..1049: note = Variant of cytochrome P450
MTIKEMPQPKTFGELKNLPLLNTDKPVQALMRIADELGEIFKFEAPGSVTRFLSSQRLIKEACDESRFDKNLSQGLKFARDFLGDGLFTSWTHEPNWKKAHNILGPSFSQRAMKRYHAMMVDIAVQLVQKWERLNADEHIEVSEDMTRLTLDTIGLCGFNYRFNSFYRDQPHPFIVSVVRALDEVMNKLQRANPDDPAYDENKRQCQEDIKVMNDYVDKIIADRKARGEQSHDLLTQMLNGKDPETGEPLDDGNIRYQIITFLIAGHETTSGLLSFALYFLVKNPHVLQKVAEEAARVLVDPVPSYKQVKQLKYVGMVLNEALRLWPTAPAFSLYAKEDTVLGGEYPLTKGDEVMVLIPQLHRDKTIWGDDVEEFRPERFENPSAIPQHAFKPFGNGQRACIGQQFALHEATLVLGMMLKHFDFEDHTNYELVIKEKLTLKPEGFVVKAKSKGIPLGGIPSPSTEQSAKKVRKKAENAHNTPLLVLYGSNAGTAEGTARDLADIAMSKGFAPQVATLDSHAGNLPREGAVLIVTASYNGHPPDNAKQFVDWLDQASADEVKGVRYSVFGCGDKNWAATYQKVPAFIDETLAAKGAENIADRGEADASDDFEGTYEEWRDHMWSDVAAYFNLDIENSEDNKSTLSLQFVDSAADMPLAKMHGAFSTNVVASKELQQPGSARSTRHLEIELPKEASYQEGDHLGVIPRNYEGIVNRVTARFGLSASQQIRLEAEEEKLAHLPLAKTVSVEELLQYVELQDPVTRTQLRAMAAKTVCPPHKVELEALLEKQAYKEQVLAKRLTMLELLEKYPACEMKFSEFIALLPSIRPRYYSISSSPRVDEKQASITVSVVSGPAWSGYGEYKGIASNYLAELQEGDTITCFISTPQSEFTLPKDPETPLIMVGPGTGVAPFRGFVQARKQLKEQGQSLGEAHLYFGCRSPHEDYLYQEELENAQSEGIITLHTAFSRMPNQPKTYVQHVMEQDGKKLIELLDQGAHFYICGDGSQMAPAVEATLMKSYADVHQVSEADARLWLQQLEEKGRYAKDVWAG

SEQ ID NO: 151 - DNA, 3147 bp, synthetic construct
  misc_feature 1..3147: note = Variant of cytochrome P450
  source 1..3147: mol_type = other DNA
atgacaattaaggaaatgcctcagcctaagacgtttggagaacttaaaaatttaccgttattaaacacagataaaccggttcaagctttgatgcgtattgcggatgaattaggagaaatctttaaattcgaggcgcctggtagcgtaacgcgctttttatcaagtcagcgtctaattaaagaagcatgcgatgaatcacgctttgataaaaacttaagtcaaggccttaaatttgcacgtgattttcttggagacgggttatttacaagctggacgcatgaaccgaattggaaaaaagcgcataatatcttaggcccaagctttagtcagcgtgcaatgaaacgttatcatgcgatgatggtcgatatcgccgtgcagcttgttcaaaagtgggagcgtctaaatgcagatgagcatattgaagtatcggaagacatgacacgtttaacgctggatacaattggtctttgcggcttcaactatcgctttaacagcttttaccgagatcagcctcatccatttattgtgagtgttgtgcgtgcactggatgaagtaatgaacaagctgcagcgagcaaatccagacgacccagcttatgatgaaaacaagcgccagtgtcaagaagatatcaaggtgatgaacgactatgtcgataaaattattgcagatcgcaaagcaaggggtgaacaaagccatgatttattaacgcagatgctaaacggaaaagatccagaaacgggtgagccgcttgatgacgggaacattcgttatcaaattattacattcttaattgcgggacacgaaacaacaagtggtcttttatcatttgcgctgtatttcttagtgaaaaatccacatgtattacaaaaagtagcagaagaagcagcacgagttctagtagatcctgttccaagctacaaacaagtcaaacagcttaaatatgtcggcatggtcttaaacgaagcgctgcgcttatggccaactgctcctgcgttttccctatatgcaaaagaagatacggtgcttggaggagaatatcctttaaccaaaggcgacgaagtaatggttctgattcctcagcttcaccgtgataaaacaatttggggagacgatgtggaggagttccgtccagagcgttttgaaaatccaagtgcgattccgcagcatgcgtttaaaccgtttggaaacggtcagcgtgcgtgtatcggtcagcagttcgctcttcatgaagcaacgctggtacttggtatgatgctaaaacactttgactttgaagatcatacaaactacgagctcgttattaaagaaaagttaacgttaaaacctgaaggctttgtggtaaaagcaaaatcgaaaggcattccgcttggcggtattccttcacctagcactgaacagtctgctaaaaaagtacgcaaaaaggcagaaaacgctcataatacgccgctgcttgtgctatacggttcaaatgcgggaacagctgaaggaacggcgcgtgatttagcagatattgcaatgagcaaaggatttgcaccgcaggtcgcaacgcttgattcacacgccggaaatcttccgcgcgaaggagctgtattaattgtaacggcgtcttataacggtcatccgcctgataacgcaaagcaatttgtcgactggttagaccaagcgtctgctgatgaagtaaaaggcgttcgctactccgtatttggatgcggcgataaaaactgggctgcgacgtatcaaaaagtgcctgcttttatcgatgaaacgcttgccgctaaaggggcagaaaacatcgctgaccgcggtgaagcagatgcaagcgacgactttgaaggcacatatgaagaatggagtgatcatatgtggagtgacgtagcagcctactttaacctcgacattgaaaacagtgaagataataaatctactctttcacttcaatttgtcgacagcgccgcggatatgccgcttgcgaaaatgcacggtgcgttttcaacgaacgtcgtagcaagcaaagaacttcaacagccaggcagtgcacgaagcacgcgacatcttgaaattgaacttccaaaagaagcttcttatcaagaaggagatcatttaggtgttattcctcgcaactatgaaggaatagtaaaccgtgtaacagcaaggttcggcctaagcgcatcacagcaaatccgtctggaagcagaagaagaaaaattagctcatttgccactcgctaaaacagtatccgtagaagagcttctgcaatacgtggagcttcaagatcctgttacgcgcacgcagcttcgcgcaatggctgctaaaacggtctgcccgccgcataaagtagagcttgaagccttgcttgaaaagcaagcctacaaagaacaagtgctggcaaaacgtttaacaatgcttgaactgcttgaaaaatacccggcgtgtgaaatgaaattcagcgaatttatcgcccttctgccaagcatacgcccgcgctattactcgatttcttcatcacctcgtgtcgatgaaaaacaagcaagcatcacggtcagcgttgtctcaggaccggcgtggagcggatatggagaatataaaggaattgcgtcgaactatcttgccgagctgcaagaaggagatacgattacgtgctttatttccacaccgcagtcagaatttacgctgccaaaagaccctgaaacgccgcttatcatggtcggaccgggaacaggcgtcgcgccgtttagaggctttgtgcaggcgcgcaaacagctaaaagaacaaggacagtcacttggaagggcacatttatacttcggctgccgttcacctcatgaagactatctgtatcaagaagagcttgaaaacgcccaaagcgaaggcatcattacgcttcataccgctttttctcgcatgccaaatcagccgaaaacatacgttcagcacgtaatggaacaagacggcaagaaattgattgaacttcttgatcaaggagcgcacttctatatttgcggagacggaagccaaatggcacctgccgttgaagcaacgcttatgaaaagctatgctgacgttcaccaagtgagtgaagcagacgctcgcttatggctgcagcagctagaagaaaaaggccgatacgcaaaagacgtgtgggctggg

SEQ ID NO: 152 - protein, 1049 aa, synthetic construct
  REGION 1..1049: note = Variant of cytochrome P450
MTIKEMPQPKTFGELKNLPLLNTDKPVQALMRIADELGEIFKFEAPGSVTRFLSSQRLIKEACDESRFDKNLSQGLKFARDFLGDGLFTSWTHEPNWKKAHNILGPSFSQRAMKRYHAMMVDIAVQLVQKWERLNADEHIEVSEDMTRLTLDTIGLCGFNYRFNSFYRDQPHPFIVSVVRALDEVMNKLQRANPDDPAYDENKRQCQEDIKVMNDYVDKIIADRKARGEQSHDLLTQMLNGKDPETGEPLDDGNIRYQIITFLIAGHETTSGLLSFALYFLVKNPHVLQKVAEEAARVLVDPVPSYKQVKQLKYVGMVLNEALRLWPTAPAFSLYAKEDTVLGGEYPLTKGDEVMVLIPQLHRDKTIWGDDVEEFRPERFENPSAIPQHAFKPFGNGQRACIGQQFALHEATLVLGMMLKHFDFEDHTNYELVIKEKLTLKPEGFVVKAKSKGIPLGGIPSPSTEQSAKKVRKKAENAHNTPLLVLYGSNAGTAEGTARDLADIAMSKGFAPQVATLDSHAGNLPREGAVLIVTASYNGHPPDNAKQFVDWLDQASADEVKGVRYSVFGCGDKNWAATYQKVPAFIDETLAAKGAENIADRGEADASDDFEGTYEEWSDHMWSDVAAYFNLDIENSEDNKSTLSLQFVDSAADMPLAKMHGAFSTNVVASKELQQPGSARSTRHLEIELPKEASYQEGDHLGVIPRNYEGIVNRVTARFGLSASQQIRLEAEEEKLAHLPLAKTVSVEELLQYVELQDPVTRTQLRAMAAKTVCPPHKVELEALLEKQAYKEQVLAKRLTMLELLEKYPACEMKFSEFIALLPSIRPRYYSISSSPRVDEKQASITVSVVSGPAWSGYGEYKGIASNYLAELQEGDTITCFISTPQSEFTLPKDPETPLIMVGPGTGVAPFRGFVQARKQLKEQGQSLGRAHLYFGCRSPHEDYLYQEELENAQSEGIITLHTAFSRMPNQPKTYVQHVMEQDGKKLIELLDQGAHFYICGDGSQMAPAVEATLMKSYADVHQVSEADARLWLQQLEEKGRYAKDVWAG

SEQ ID NO: 153 - DNA, 3147 bp, synthetic construct
  misc_feature 1..3147: note = Variant of cytochrome P450
  source 1..3147: mol_type = other DNA
atgacaattaaggaaatgcctcagcctaagacgtttggagaacttaaaaatttaccgttattaaacacagataaaccggttcaagctttgatgcgtattgcggatgaattaggagaaatctttaaattcgaggcgcctggtagcgtaacgcgctttttatcaagtcagcgtctaattaaagaagcatgcgatgaatcacgctttgataaaaacttaagtcaaggccttaaatttgcacgtgattttcttggagacgggttatttacaagctggacgcatgaaccgaattggaaaaaagcgcataatatcttaggcccaagctttagtcagcgtgcaatgaaacgttatcatgcgatgatggtcgatatcgccgtgcagcttgttcaaaagtgggagcgtctaaatgcagatgagcatattgaagtatcggaagacatgacacgtttaacgctggatacaattggtctttgcggcttcaactatcgctttaacagcttttaccgagatcagcctcatccatttattgtgagtgttgtgcgtgcactggatgaagtaatgaacaagctgcagcgagcaaatccagacgacccagcttatgatgaaaacaagcgccagtgtcaagaagatatcaaggtgatgaacgactatgtcgataaaattattgcagatcgcaaagcaaggggtgaacaaagccatgatttattaacgcagatgctaaacggaaaagatccagaaacgggtgagccgcttgatgacgggaacattcgttatcaaattattacattcttaattgcgggacacgaaacaacaagtggtcttttatcatttgcgctgtatttcttagtgaaaaatccacatgtattacaaaaagtagcagaagaagcagcacgagttctagtagatcctgttccaagctacaaacaagtcaaacagcttaaatatgtcggcatggtcttaaacgaagcgctgcgcttatggccaactgctcctgcgttttccctatatgcaaaagaagatacggtgcttggaggagaatatcctttaattaaaggcgacgaagtaatggttctgattcctcagcttcaccgtgataaaacaatttggggagacgatgtggaggagttccgtccagagcgttttgaaaatccaagtgcgattccgcagcatgcgtttaaaccgtttggaaacggtcagcgtgcgtgtatcggtcagcagttcgctcttcatgaagcaacgctggtacttggtatgatgctaaaacactttgactttgaagatcatacaaactacgagctcgttattaaagaaaagttaacgttaaaacctgaaggctttgtggtaaaagcaaaatcgaaaggcattccgcttggcggtattccttcacctagcactgaacagtctgctaaaaaagtacgcaaaaaggcagaaaacgctcataatacgccgctgcttgtgctatacggttcaaatgcgggaacagctgaaggaacggcgcgtgatttagcagatattgcaatgagcaaaggatttgcaccgcaggtcgcaacgcttgattcacacgccggaaatcttccgcgcgaaggagctgtattaattgtaacggcgtcttataacggtcatccgcctgataacgcaaagcaatttgtcgactggttagaccaagcgtctgctgatgaagtaaaaggcgttcgctactccgtatttggatgcggcgataaaaactgggctgcgacgtatcaaaaagtgcctgcttttatcgatgaaacgcttgccgctaaaggggcagaaaacatcgctgaccgcggtgaagcagatgcaagcgacgactttgaaggcacatatgaagaatggcgtgatcatatgtggagtgacgtagcagcctactttaacctcgacattgaaaacagtgaagataataaatctactctttcacttcaatttgtcgacagcgccgcggatatgccgcttgcgaaaatgcacggtgcgttttcaacgaacgtcgtagcaagcaaagaacttcaacagccaggcagtgcacgaagcacgcgacatcttgaaattgaacttccaaaagaagcttcttatcaagaaggagatcatttaggtgttattcctcgcaactatgaaggaatagtaaaccgtgtaacagcaaggttcggcctaagcgcatcacagcaaatccgtctggaagcagaagaagaaaaattagctcatttgccactcgctaaaacagtatccgtagaagagcttctgcaatacgtggagcttcaagatcctgttacgcgcacgcagcttcgcgcaatggctgctaaaacggtctgcccgccgcataaagtagagcttgaagccttgcttgaaaagcaagcctacaaagaacaagtgctggcaaaacgtttaacaatgcttgaactgcttgaaaaatacccggcgtgtgaaatgaaattcagcgaatttatcgcccttctgccaagcatacgcccgcgctattactcgatttcttcatcacctcgtgtcgatgaaaaacaagcaagcatcacggtcagcgttgtctcaggaccggcgtggagcggatatggagaatataaaggaattgcgtcgaactatcttgccgagctgcaagaaggagatacgattacgtgctttatttccacaccgcagtcagaatttacgctgccaaaagaccctgaaacgccgcttatcatggtcggaccgggaacaggcgtcgcgccgtttagaggctttgtgcaggcgcgcaaacagctaaaagaacaaggacagtcacttggagaagcacatttatacttcggctgccgttcacctcatgaagactatctgtatcaagaagagcttgaaaacgcccaaagcgaaggcatcattacgcttcataccgctttttctcgcatgccaaatcagccgaaaacatacgttcagcacgtaatggaacaagacggcaagaaattgattgaacttcttgatcaaggagcgcacttctatatttgcggagacggaagccaaatggcacctgccgttgaagcaacgcttatgaaaagctatgctgacgttcaccaagtgagtgaagcagacgctcgcttatggctgcagcagctagaagaaaaaggccgatacgcaaaagacgtgtgggctggg

SEQ ID NO: 154 - protein, 1049 aa, synthetic construct
  REGION 1..1049: note = Variant of cytochrome P450
MTIKEMPQPKTFGELKNLPLLNTDKPVQALMRIADELGEIFKFEAPGSVTRFLSSQRLIKEACDESRFDKNLSQGLKFARDFLGDGLFTSWTHEPNWKKAHNILGPSFSQRAMKRYHAMMVDIAVQLVQKWERLNADEHIEVSEDMTRLTLDTIGLCGFNYRFNSFYRDQPHPFIVSVVRALDEVMNKLQRANPDDPAYDENKRQCQEDIKVMNDYVDKIIADRKARGEQSHDLLTQMLNGKDPETGEPLDDGNIRYQIITFLIAGHETTSGLLSFALYFLVKNPHVLQKVAEEAARVLVDPVPSYKQVKQLKYVGMVLNEALRLWPTAPAFSLYAKEDTVLGGEYPLIKGDEVMVLIPQLHRDKTIWGDDVEEFRPERFENPSAIPQHAFKPFGNGQRACIGQQFALHEATLVLGMMLKHFDFEDHTNYELVIKEKLTLKPEGFVVKAKSKGIPLGGIPSPSTEQSAKKVRKKAENAHNTPLLVLYGSNAGTAEGTARDLADIAMSKGFAPQVATLDSHAGNLPREGAVLIVTASYNGHPPDNAKQFVDWLDQASADEVKGVRYSVFGCGDKNWAATYQKVPAFIDETLAAKGAENIADRGEADASDDFEGTYEEWRDHMWSDVAAYFNLDIENSEDNKSTLSLQFVDSAADMPLAKMHGAFSTNVVASKELQQPGSARSTRHLEIELPKEASYQEGDHLGVIPRNYEGIVNRVTARFGLSASQQIRLEAEEEKLAHLPLAKTVSVEELLQYVELQDPVTRTQLRAMAAKTVCPPHKVELEALLEKQAYKEQVLAKRLTMLELLEKYPACEMKFSEFIALLPSIRPRYYSISSSPRVDEKQASITVSVVSGPAWSGYGEYKGIASNYLAELQEGDTITCFISTPQSEFTLPKDPETPLIMVGPGTGVAPFRGFVQARKQLKEQGQSLGEAHLYFGCRSPHEDYLYQEELENAQSEGIITLHTAFSRMPNQPKTYVQHVMEQDGKKLIELLDQGAHFYICGDGSQMAPAVEATLMKSYADVHQVSEADARLWLQQLEEKGRYAKDVWAG

SEQ ID NO: 155 - DNA, 3147 bp, synthetic construct
  misc_feature 1..3147: note = Variant of cytochrome P450
  source 1..3147: mol_type = other DNA
atgacaattaaggaaatgcctcagcctaagacgtttggagaacttaaaaatttaccgttattaaacacagataaaccggttcaagcgttgatgcgtattgcggatgaattaggagaaatctttaaattcgaggcgcctggtagcgtaacgcgctttttatcaagtcagcgtctaattaaagaagcatgcgatgaatcacgctttgataaaaacttaagtcaaggccttaaatttgcacgtgattttcttggagacgggttatttacaagttggacgcatgaaccgaattggaaaaaagcgcataatatcttaggcccaagctttagtcagcgtgcaatgaaacgttatcatgcgatgatggtcgatatcgccgtgcagcttgttcaaaagtgggagcgtctaaatgcagatgagcatattgaagtatcggaagacatgacacgtttaacgctggatacaattggtctttgcggcttcaactatcgctttaacagcttttaccgagatcagcctcatccatttattgtgagtgttgtgcgtgcactggatgaagtaatgaacaagctgcagcgagcaaatccagacgacccagcttatgatgaaaacaagcgccagtgtcaagaagatatcaaggtgatgaacgactatgtcgataaaattattgcagatcgcaaagcaaggggtgaacaaagccatgatttattaacgcagatgctaaacggaaaagatccagaaacgggtgagccgcttgatgacgggaacattcgttatcaaattattacattcttaattgcgggacacgaaacaacaagtggtcttttatcatttgcgctgtatttcttagtgaaaaatccacatgtattacaaaaagtagcagaagaagcagcacgagttctagtagatcctgttccaagctacaaacaagtcaaacagcttaaatatgtcggcatggtcttaaacgaagcgctgcgcttatggccaactgctcctgcgtttggtctatatgcaaaagaagatacggtgcttggaggagaatatcctttaaccaaaggcgacgaagtaatggttctgattcctcagcttcaccgtgataaaacaatttggggagacgatgtggaggagttccgtccagagcgttttgaaaatccaagtgcgattccgcagcatgcgtttaaaccgtttggaaacggtcagcgtgcgtgtatcggtcagcagttcgctcttcatgaagcaacgctggtacttggtatgatgctaaaacactttgactttgaagatcatacaaactacgagctcgttattggcgaaaagttaacgttaaaacctgaaggctttgtggtaaaagcaaaatcgaaaggcattccgcttggcggtattccttcacctagcactgaacagtctgctaaaaaagtacgcaaaaaggcagaaaacgctcataatacgccgctgcttgtgctatacggttcaaatgcgggaacagctgaaggaacggcgcgtgatttagcagatattgcaatgagcaaaggatttgcaccgcaggtcgcaacgcttgattcacacgccggaaatcttccgcgcgaaggagctgtattaattgtaacggcgtcttataacggtcatccgcctgataacgcaaagcaatttgtcgactggttagaccaagcgtctgctgatgaagtaaaaggcgttcgctactccgtatttggatgcggcgataaaaactgggctgcgacgtatcaaaaagtgcctgcttttatcgatgaaacgcttgccgctaaaggggcagaaaacatcgctgaccgcggtgaagcagatgcaagcgacgactttgaaggcacatatgaagaatggagcgatcatatgtggagtgacgtagcagcctactttaacctcgacattgaaaacagtgaagataataaatctactctttcacttcaatttgtcgacagcgccgcggatatgccgcttgcgaaaatgcacggtgcgttttcaacgaacgtcgtagcaagcaaagaacttcaacagccaggcagtgcacgaagcacgcgacatcttgaaattgaacttccaaaagaagcttcttatcaagaaggagatcatttaggtgttattcctcgcaactatgaaggaatagtaaaccgtgtaacagcaaggttcggcctaagcgcatcacagcaaatccgtctggaagcagaagaagaaaaattagctcatttgccactcgctaaaacagtatccgtagaagagcttctgcaatacgtggagcttcaagatcctgttacgcgcacgcagcttcgcgcaatggctgctaaaacggtctgcccgccgcataaagtagagcttgaagccttgcttgaaaagcaagcctacaaagaacaagtgctggcaaaacgtttaacaatgcttgaactgcttgaaaaatacccggcgtgtgaaatgaaattcagcgaatttatcgcccttctgccaagcatacgcccgcgctattactcgatttcttcatcacctcgtgtcgatgaaaaacaagcaagcatcacggtcagcgttgtctcaggaccggcgtggagcggatatggagaatataaaggaattgcgtcgaactatcttgccgagctgcaagaaggagatacgattacgtgctttatttccacaccgcagtcagaatttacgctgccaaaagaccctgaaacgccgcttatcatggtcggaccgggaacaggcgtcgcgccgtttagaggctttgtgcaggcgcgcaaacagctaaaagaacaaggacagtcacttggagaagcacatttatacttcggctgccgttcacctcatgaagactatctgtatcaagaagagcttgaaaacgcccaaagcgaaggcatcattacgcttcataccgctttttctcgcatgccaaatcagccgaaaacatacgttcagcacgtaatggaacaagacggcaagaaattgattgaacttcttgatcaaggagcgcacttctatatttgcggagacggaagccaaatggcacctgccgttgaagcaacgcttatgaaaagctatgctgacgttcaccaagtgagtgaagcagacgctcgcttatggctgcagcagctagaagaaaaaggccgatacgcaaaagacgtgtgggctggg

SEQ ID NO: 156 - protein, 1049 aa, synthetic construct
  REGION 1..1049: note = Variant of cytochrome P450
MTIKEMPQPKTFGELKNLPLLNTDKPVQALMRIADELGEIFKFEAPGSVTRFLSSQRLIKEACDESRFDKNLSQGLKFARDFLGDGLFTSWTHEPNWKKAHNILGPSFSQRAMKRYHAMMVDIAVQLVQKWERLNADEHIEVSEDMTRLTLDTIGLCGFNYRFNSFYRDQPHPFIVSVVRALDEVMNKLQRANPDDPAYDENKRQCQEDIKVMNDYVDKIIADRKARGEQSHDLLTQMLNGKDPETGEPLDDGNIRYQIITFLIAGHETTSGLLSFALYFLVKNPHVLQKVAEEAARVLVDPVPSYKQVKQLKYVGMVLNEALRLWPTAPAFGLYAKEDTVLGGEYPLTKGDEVMVLIPQLHRDKTIWGDDVEEFRPERFENPSAIPQHAFKPFGNGQRACIGQQFALHEATLVLGMMLKHFDFEDHTNYELVIGEKLTLKPEGFVVKAKSKGIPLGGIPSPSTEQSAKKVRKKAENAHNTPLLVLYGSNAGTAEGTARDLADIAMSKGFAPQVATLDSHAGNLPREGAVLIVTASYNGHPPDNAKQFVDWLDQASADEVKGVRYSVFGCGDKNWAATYQKVPAFIDETLAAKGAENIADRGEADASDDFEGTYEEWSDHMWSDVAAYFNLDIENSEDNKSTLSLQFVDSAADMPLAKMHGAFSTNVVASKELQQPGSARSTRHLEIELPKEASYQEGDHLGVIPRNYEGIVNRVTARFGLSASQQIRLEAEEEKLAHLPLAKTVSVEELLQYVELQDPVTRTQLRAMAAKTVCPPHKVELEALLEKQAYKEQVLAKRLTMLELLEKYPACEMKFSEFIALLPSIRPRYYSISSSPRVDEKQASITVSVVSGPAWSGYGEYKGIASNYLAELQEGDTITCFISTPQSEFTLPKDPETPLIMVGPGTGVAPFRGFVQARKQLKEQGQSLGEAHLYFGCRSPHEDYLYQEELENAQSEGIITLHTAFSRMPNQPKTYVQHVMEQDGKKLIELLDQGAHFYICGDGSQMAPAVEATLMKSYADVHQVSEADARLWLQQLEEKGRYAKDVWAG

SEQ ID NO: 157 - DNA, 3147 bp, synthetic construct
  misc_feature 1..3147: note = Variant of cytochrome P450
  source 1..3147: mol_type = other DNA
atgacaattaaggaaatgcctcagcctaagacgtttggagaacttaaaaatttaccgttattaaacacagataaaccggttcaagctttgatgcgtattgcggatgaattaggagaaatctttaaattcgaggcgcctggtagcgtaacgcgctttttatcaagtcagcgtctaattaaagaagcatgcgatgaatcacgctttgataaaaacttaagtcaaggccttaaatttgcacgtgattttcttggagacgggttatttacaagctggacgcatgaaccgaattggaaaaaagcgcataatatcttaggcccaagctttagtcagcgtgcaatgaaacgttatcatgcgatgatggtcgatatcgccgtgcagcttgttcaaaagtgggagcgtctaaatgcagatgagcatattgaagtatcggaagacatgacacgtttaacgctggatacaattggtctttgcggcttcaactatcgctttaacagcttttaccgagatcagcctcatccatttattgtgagtgttgtgcgtgcactggatgaagtaatgaacaagctgcagcgagcaaatccagacgacccagcttatgatgaaaacaagcgccagtgtcaagaagatatcaaggtgatgaacgactatgtcgataaaattattgcagatcgcaaagcaaggggtgaacaaagccatgatttattaacgcagatgctaaacggaaaagatccagaaacgggtgagccgcttgatgacgggaacattcgttatcaaattattacattcttaattgcgggacacgaaacaacaagtggtcttttatcatttgcgctgtatttcttagtgaaaaatccacatgtattacaaaaagtagcagaagaagcagcacgagttctagtagatcctgttccaagctacaaacaagtcaaacagcttaaatatgtcggcatggtcttaaacgaagcgctgcgcttatggccaactgctcctgcgttttccctatatgcaaaagaagatacggtgcttggaggagaatatcctttaaccaaaggcgacgaagtaatggttctgattcctcagcttcaccgtgataaaacaatttggggagacgatgtggaggagttccgtccagagcgttttgaaaatccaagtgcgattccgcagcatgcgtttaaaccgtttggaaacggtcagcgtgcgtgtatcggtcagcagttcgctcttcatgaagcaacgctggtacttggtatgatgctaaaacactttgactttgaagatcatacaaactacgagctcgttattaaagaaaagttaacgttaaaacctgaaggctttgtggtaaaagcaaaatcgaaaggcattccgcttggcggtattccttcacctagcactgaacagtctgctaaaaaagtacgcaaaaaggcagaaaacgctcataatacgccgctgcttgtgctatacggttcaaatgcgggaacagctgaaggaacggcgcgtgatttagcagatattgcaatgagcaaaggatttgcaccgcaggtcgcaacgcttgattcacacgccggaaatcttccgcgcgaaggagctgtattaattgtaacggcgtcttataacggtcatccgcctgataacgcaaagcaatttgtcgactggttagaccaagcgtctgctgatgaagtaaaaggcgttcgctactccgtatttggatgcggcgataaaaactgggctgcgacgtatcaaaaagtgcctgcttttatcgatgaaacgcttgccgctaaaggggcagaaaacatcgctgaccgcggtgaagcagatgcaagcgacgactttgaaggcacatatgaagaatggagtgatcatatgtggagtgacgtagcagcctactttaacctcgacattgaaaacagtgaagataataaatctactctttcacttcaatttgtcgacagcgccgcggatatgccgcttgcgaaaatgcacggtgcgttttcaacgaacgtcgtagcaagcaaagaacttcaacagccaggcagtgcacgaagcacgcgacatcttgaaattgaacttccaaaagaagcttcttatcaagaaggagatcatttaggtgttattcctcgcaactatgaaggaatagtaaaccgtgtaacagcaaggttcggcctaagcgcatcacagcaaatccgtctggaagcagaagaagaaaaattagctcatttgccactcgctaaaacagtatccgtagaagagcttctgcaatacgtggagcttcaagatcctgttacgcgcacgcagcttcgcgcaatggctgctaaaacggtctgcccgccgcataaagtagagcttgaagccttgcttgaaaagcaagcctacaaagaacaagtgctggcaaaacgtttaacaatgcttgaactgcttgaaaaatacccggcgtgtgaaatgaaattcagcgaatttatcgcccttctgccaagcatacgcccgcgctattactcgatttcttcatcacctcgtgtcgatgaaaaacaagcaagcatcacggtcagcgttgtctcaggaccggcgtggagcggatatggagaatataaaggaattgcgtcgaactatcttgccgagctgcaagaaggagatacgattacgtgctttatttccacatctcagtcagaatttacgctgccaaaagaccctgaaacgccgcttatcatggtcggaccgggaacaggcgtcgcgccgtttagaggctttgtgcaggcgcgcaaacagctaaaagaacaaggacagtcacttggagaagcacatttatacttcggctgccgttcacctcatgaagactatctgtatcaagaagagcttgaaaacgcccaaagcgaaggcatcattacgcttcataccgctttttctcgcatgccaaatcagccgaaaacatacgttcagcacgtaatggaacaagacggcaagaaattgattgaacttcttgatcaaggagcgcacttctatatttgcggagacggaagccaaatggcacctgccgttgaagcaacgcttatgaaaagctatgctgacgttcaccaagtgagtgaagcagacgctcgcttatggctgcagcagctagaagaaaaaggccgatacgcaaaagacgtgtgggctggg

SEQ ID NO: 158 - protein, 1049 aa, synthetic construct
  REGION 1..1049: note = Variant of cytochrome P450
MTIKEMPQPKTFGELKNLPLLNTDKPVQALMRIADELGEIFKFEAPGSVTRFLSSQRLIKEACDESRFDKNLSQGLKFARDFLGDGLFTSWTHEPNWKKAHNILGPSFSQRAMKRYHAMMVDIAVQLVQKWERLNADEHIEVSEDMTRLTLDTIGLCGFNYRFNSFYRDQPHPFIVSVVRALDEVMNKLQRANPDDPAYDENKRQCQEDIKVMNDYVDKIIADRKARGEQSHDLLTQMLNGKDPETGEPLDDGNIRYQIITFLIAGHETTSGLLSFALYFLVKNPHVLQKVAEEAARVLVDPVPSYKQVKQLKYVGMVLNEALRLWPTAPAFSLYAKEDTVLGGEYPLTKGDEVMVLIPQLHRDKTIWGDDVEEFRPERFENPSAIPQHAFKPFGNGQRACIGQQFALHEATLVLGMMLKHFDFEDHTNYELVIKEKLTLKPEGFVVKAKSKGIPLGGIPSPSTEQSAKKVRKKAENAHNTPLLVLYGSNAGTAEGTARDLADIAMSKGFAPQVATLDSHAGNLPREGAVLIVTASYNGHPPDNAKQFVDWLDQASADEVKGVRYSVFGCGDKNWAATYQKVPAFIDETLAAKGAENIADRGEADASDDFEGTYEEWSDHMWSDVAAYFNLDIENSEDNKSTLSLQFVDSAADMPLAKMHGAFSTNVVASKELQQPGSARSTRHLEIELPKEASYQEGDHLGVIPRNYEGIVNRVTARFGLSASQQIRLEAEEEKLAHLPLAKTVSVEELLQYVELQDPVTRTQLRAMAAKTVCPPHKVELEALLEKQAYKEQVLAKRLTMLELLEKYPACEMKFSEFIALLPSIRPRYYSISSSPRVDEKQASITVSVVSGPAWSGYGEYKGIASNYLAELQEGDTITCFISTSQSEFTLPKDPETPLIMVGPGTGVAPFRGFVQARKQLKEQGQSLGEAHLYFGCRSPHEDYLYQEELENAQSEGIITLHTAFSRMPNQPKTYVQHVMEQDGKKLIELLDQGAHFYICGDGSQMAPAVEATLMKSYADVHQVSEADARLWLQQLEEKGRYAKDVWAG

SEQ ID NO: 159 - DNA, 3147 bp, synthetic construct
  misc_feature 1..3147: note = Variant of cytochrome P450
  source 1..3147: mol_type = other DNA
atgacaattaaggaaatgcctcagcctaagacgtttggagaacttaaaaatttaccgttattaaacacagataaaccggttcaagctttgatgcgtattgcggatgaattaggagaaatctttaaattcgaggcgcctggtagcgtaacgcgctttttatcaagtcagcgtctaattaaagaagcatgcgatgaatcacgctttgataaaaacttaagtcaaggccttaaatttgcacgtgattttcttggagacgggttatttacaagctggacgcatgaaccgaattggaaaaaagcgcataatatcttaggcccaagctttagtcagcgtgcaatgaaacgttatcatgcgatgatggtcgatatcgccgtgcagcttgttcaaaagtgggagcgtctaaatgcagatgagcatattgaagtatcggaagacatgacacgtttaacgctggatacaattggtctttgcggcttcaactatcgctttaacagcttttaccgagatcagcctcatccatttattgtgagtgttgtgcgtgcactggatgaagtaatgaacaagctgcagcgagcaaatccagacgacccagcttatgatgaaaacaagcgccagtgtcaagaagatatcaaggtgatgaacgactatgtcgataaaattattgcagatcgcaaagcaaggggtgaacaaagccatgatttattaacgcagatgctaaacggaaaagatccagaaacgggtgagccgcttgatgacgggaacattcgttatcaaattattacattcttaattgcgggacacgaaacaacaagtggtcttttatcatttgcgctgtatttcttagtgaaaaatccacatgtattacaaaaagtagcagaagaagcagcacgagttctagtagatcctgttccaagctacaaacaagtcaaacagcttaaatatgtcggcatggtcttaaacgaagcgctgcgcttatggccaactgctcctgcgttttccctatatgcaaaagaagatacggtgcttggaggagaatatcctttaaccaaaggcgacgaagtaatggttctgattcctcagcttcaccgtgataaaacaatttggggagacgatgtggaggagttccgtccagagcgttttgaaaatccaagtgcgattccgcagcatgcgtttaaaccgtttggaaacggtcagcgtgcgtgtatcggtcagcagttcgctcttcatgaagcaacgctggtacttggtatgatgctaaaacactttgactttgaagatcatacaaactacgagctcgttattaaagaaaagttaacgttaaaacctgaaggctttgtggtaaaagcaaaatcgaaaggcatgccgcttggcggtattccttcacctagcactgaacagtctgctaaaaaagtacgcaaaaaggcagaaaacgctcataatacgccgctgcttgtgctatacggttcaaatgcgggaacagctgaaggaacggcgcgtgatttagcagatattgcaatgagcaaaggatttgcaccgcaggtcgcaacgcttgattcacacgccggaaatcttccgcgcgaaggagctgtattaattgtaacggcgtcttataacggtcatccgcctgataacgcaaagcaatttgtcgactggttagaccaagcgtctgctgatgaagtaaaaggcgttcgctactccgtatttggatgcggcgataaaaactgggctgcgacgtatcaaaaagtgcctgcttttatcgatgaaacgcttgccgctaaaggggcagaaaacatcgctgaccgcggtgaagcagatgcaagcgacgactttgaaggcacatatgaagaatggagtgatcatatgtggagtgacgtagcagcctactttaacctcgacattgaaaacagtgaagataataaatctactctttcacttcaatttgtcgacagcgccgcggatatgccgcttgcgaaaatgcacggtgcgttttcaacgaacgtcgtagcaagcaaagaacttcaacagccaggcagtgcacgaagcacgcgacatcttgaaattgaacttccaaaagaagcttcttatcaagaaggagatcatttaggtgttattcctcgcaactatgaaggaatagtaaaccgtgtaacagcaaggttcggcctaagcgcatcacagcaaatccgtctggaagcagaagaagaaaaattagctcatttgccactcgctaaaacagtatccgtagaagagcttctgcaatacgtggagcttcaagatcctgttacgcgcacgcagcttcgcgcaatggctgctaaaacggtctgcccgccgcataaagtagagcttgaagccttgcttgaaaagcaagcctacaaagaacaagtgctggcaaaacgtttaacaatgcttgaactgcttgaaaaatacccggcgtgtgaaatgaaattcagcgaatttatcgcccttctgccaagcatacgcccgcgctattactcgatttcttcatcacctcgtgtcgatgaaaaacaagcaagcatcacggtcagcgttgtctcaggaccggcgtggagcggatatggagaatataaaggaattgcgtcgaactatcttgccgagctgcaagaaggagatacgattacgtgctttatttccacaccgcagtcagaatttacgctgccaaaagaccctgaaacgccgcttatcatggtcggaccgggaacaggcgtcgcgccgtttagaggctttgtgcaggcgcgcaaacagctaaaagaacaaggacagtcacttggagaagcacatttatacttcggctgccgttcacctcatgaagactatctgtatcaagaagagcttgaaaacgcccaaagcgaaggcatcattacgcttcataccgctttttctcgcatgccaaatcagccgaaaacatacgttcagcacgtaatggaacaagacggcaagaaattgattgaacttcttgatcaaggagcgcacttctatatttgcggagacggaagccaaatggcacctgccgttgaagcaacgcttatgaaaagctatgctgacgttcaccaagtgagtgaagcagacgctcgcttatggctgcagcagctagaagaaaaaggccgatacgcaaaagacgtgtgggctggg

SEQ ID NO: 160 - protein, 1049 aa, synthetic construct
  REGION 1..1049: note = Variant of cytochrome P450
MTIKEMPQPKTFGELKNLPLLNTDKPVQALMRIADELGEIFKFEAPGSVTRFLSSQRLIKEACDESRFDKNLSQGLKFARDFLGDGLFTSWTHEPNWKKAHNILGPSFSQRAMKRYHAMMVDIAVQLVQKWERLNADEHIEVSEDMTRLTLDTIGLCGFNYRFNSFYRDQPHPFIVSVVRALDEVMNKLQRANPDDPAYDENKRQCQEDIKVMNDYVDKIIADRKARGEQSHDLLTQMLNGKDPETGEPLDDGNIRYQIITFLIAGHETTSGLLSFALYFLVKNPHVLQKVAEEAARVLVDPVPSYKQVKQLKYVGMVLNEALRLWPTAPAFSLYAKEDTVLGGEYPLTKGDEVMVLIPQLHRDKTIWGDDVEEFRPERFENPSAIPQHAFKPFGNGQRACIGQQFALHEATLVLGMMLKHFDFEDHTNYELVIKEKLTLKPEGFVVKAKSKGMPLGGIPSPSTEQSAKKVRKKAENAHNTPLLVLYGSNAGTAEGTARDLADIAMSKGFAPQVATLDSHAGNLPREGAVLIVTASYNGHPPDNAKQFVDWLDQASADEVKGVRYSVFGCGDKNWAATYQKVPAFIDETLAAKGAENIADRGEADASDDFEGTYEEWSDHMWSDVAAYFNLDIENSEDNKSTLSLQFVDSAADMPLAKMHGAFSTNVVASKELQQPGSARSTRHLEIELPKEASYQEGDHLGVIPRNYEGIVNRVTARFGLSASQQIRLEAEEEKLAHLPLAKTVSVEELLQYVELQDPVTRTQLRAMAAKTVCPPHKVELEALLEKQAYKEQVLAKRLTMLELLEKYPACEMKFSEFIALLPSIRPRYYSISSSPRVDEKQASITVSVVSGPAWSGYGEYKGIASNYLAELQEGDTITCFISTPQSEFTLPKDPETPLIMVGPGTGVAPFRGFVQARKQLKEQGQSLGEAHLYFGCRSPHEDYLYQEELENAQSEGIITLHTAFSRMPNQPKTYVQHVMEQDGKKLIELLDQGAHFYICGDGSQMAPAVEATLMKSYADVHQVSEADARLWLQQLEEKGRYAKDVWAG

SEQ ID NO: 161 - DNA, 3147 bp, synthetic construct
  misc_feature 1..3147: note = Variant of cytochrome P450
  source 1..3147: mol_type = other DNA
atgacaattaaggaaatgcctcagcctaagacgtttggagaacttaaaaatttaccgttattaaacacagataaaccggttcaagctttgatgcgtattgcggatgaattaggagaaatctttaaattcgaggcgcctggtagcgtaacgcgctttttatcaagtcagcgtctaattaaagaagcatgcgatgaatcacgctttgataaaaacttaagtcaaggccttaaatttgcacgtgattttcttggagacgggttatttacaagctggacgcatgaaccgaattggaaaaaagcgcataatatcttaggcccaagctttagtcagcgtgcaatgaaacgttatcatgcgatgatggtcgatatcgccgtgcagcttgttcaaaagtgggagcgtctaaatgcagatgagcatattgaagtatcggaagacatgacacgtttaacgctggatacaattggtctttgcggcttcaactatcgctttaacagcttttaccgagatcagcctcatccatttattgtgagtgttgtgcgtgcactggatgaagtaatgaacaagctgcagcgagcaaatccagacgacccagcttatgatgaaaacaagcgccagtgtcaagaagatatcaaggtgatgaacgactatgtcgataaaattattgcagatcgcaaagcaaggggtgaacaaagccatgatttattaacgcagatgctaaacggaaaagatccagaaacgggtgagccgcttgatgacgggaacattcgttatcaaattattacattcttaattgcgggacacgaaacaacaagtggtcttttatcatttgcgctgtatttcttagtgaaaaatccacatgtattacaaaaagtagcagaagaagcagcacgagttctagtagatcctgttccaagctacaaacaagtcaaacagcttaaatatgtcggcatggtcttaaacgaagcgctgcgcttatggccaactgctcctgcgttttccctatatgcaaaagaagatacggtgcttggaggagaatatcctttaaccaaaggcgacgaagtaatggttctgattcctcagcttcaccgtgataaaacaatttggggagacgatgtggaggagttccgtccagagcgttttgaaaatccaagtgcgattccgcagcatgcgtttaaaccgtttggaaacggtcagcgtgcgtgtatcggtcagcagttcgctcttcatgaagcaacgctggtacttggtatgatgctaaaacactttgactttgaagatcatacaaactacgagctcgttattaaagaaaagttaacgttaaaacctgaaggctttgtggtaaaagcaaaatcgaaaggcattccgcttggcggtattccttcacctagcactgaacagtctgctaaaaaagtacgcaaaaaggcagaaaacgctcataatacgccgctgcttgtgctatacggttcaaatgcgggaacagctgaaggaacggcgcgtgatttagcagatattgcaatgagcaaaggatttgcaccgcaggtcgcaacgcttgattcacacgccggaaatcttccgcgcgaaggagctgtattaattgtaacggcgtcttataacggtcatccgcctgataacgcaaagcaatttgtcgactggttagaccaagcgtctgctgatgaagtaaaaggcgttcgctactccgtatttggatgcggcgataaaaactgggctgcgacgtatcaaaaagtgcctgcttttatcgatgaaacgcttgccgctaaaggggcagaaaacatcgctgaccgcggtgaagcagatgcaagcgacgactttgaaggcacatatgaagaatggagtgatcatatgtggagtgacgtagcagcctactttaacctcgacattgaaaacagtgaagataataaatctactctttcacttcaatttgtcgacagcgccgcggatatgccgcttgcgaaaatgcacggtgcgttttcaacgaacgtcgtagcaagcaaagaacttcaacagccaggcagtgcacgaagcacgcgacatcttgaaattgaacttccaaaagaagcttcttatcaagaaggagatcatttaggtgttattcctcgcaactatgaaggaatagtaaaccgtgtaacagcaaggttcggcctaagcgcatcacagcaaatccgtctggaagcagaagaagaaaaattagctcatttgccactcgctaaaacagtatccgtagaagagcttctgcaatacgtggagcttcaagatcctgttacgcgcacgcagcttcgcgcaatggctgctaaaacggtctgcccgccgcataaagtagagcttgaagccttgcttgaaaagcaagcctacaaagaacaagtgctggcaaaacgtttaacaatgcttgaactgcttgaaaaatacccggcgtgtgaaatgaaattcagcgaatttatcgcccttctgccaagcatacgcccgcgctattactcgatttcttcatcacctcgtgtcgatgaaaaacaagcaagcatcacggtcagcgttgtctcaggaccggcgtggagcggatatggagaatataaaggaattgcgtcgaactatcttgccgagctgcaagaaggagatacgattacgtgctttatttccacagatcagtcagaatttacgctgccaaaagaccctgaaacgccgcttatcatggtcggaccgggaacaggcgtcgcgccgtttagaggctttgtgcaggcgcgcaaacagctaaaagaacaaggacagtcacttggagaagcacatttatacttcggctgccgttcacctcatgaagactatctgtatcaagaagagcttgaaaacgcccaaagcgaaggcatcattacgcttcataccgctttttctcgcatgccaaatcagccgaaaacatacgttcagcacgtaatggaacaagacggcaagaaattgattgaacttcttgatcaaggagcgcacttctatatttgcggagacggaagccaaatggcacctgccgttgaagcaacgcttatgaaaagctatgctgacgttcaccaagtgagtgaagcagacgctcgcttatggctgcagcagctagaagaaaaaggccgatacgcaaaagacgtgtgggctggg

SEQ ID NO: 162 - protein, 1049 aa, synthetic construct
  REGION 1..1049: note = Variant of cytochrome P450
MTIKEMPQPKTFGELKNLPLLNTDKPVQALMRIADELGEIFKFEAPGSVTRFLSSQRLIKEACDESRFDKNLSQGLKFARDFLGDGLFTSWTHEPNWKKAHNILGPSFSQRAMKRYHAMMVDIAVQLVQKWERLNADEHIEVSEDMTRLTLDTIGLCGFNYRFNSFYRDQPHPFIVSVVRALDEVMNKLQRANPDDPAYDENKRQCQEDIKVMNDYVDKIIADRKARGEQSHDLLTQMLNGKDPETGEPLDDGNIRYQIITFLIAGHETTSGLLSFALYFLVKNPHVLQKVAEEAARVLVDPVPSYKQVKQLKYVGMVLNEALRLWPTAPAFSLYAKEDTVLGGEYPLTKGDEVMVLIPQLHRDKTIWGDDVEEFRPERFENPSAIPQHAFKPFGNGQRACIGQQFALHEATLVLGMMLKHFDFEDHTNYELVIKEKLTLKPEGFVVKAKSKGIPLGGIPSPSTEQSAKKVRKKAENAHNTPLLVLYGSNAGTAEGTARDLADIAMSKGFAPQVATLDSHAGNLPREGAVLIVTASYNGHPPDNAKQFVDWLDQASADEVKGVRYSVFGCGDKNWAATYQKVPAFIDETLAAKGAENIADRGEADASDDFEGTYEEWSDHMWSDVAAYFNLDIENSEDNKSTLSLQFVDSAADMPLAKMHGAFSTNVVASKELQQPGSARSTRHLEIELPKEASYQEGDHLGVIPRNYEGIVNRVTARFGLSASQQIRLEAEEEKLAHLPLAKTVSVEELLQYVELQDPVTRTQLRAMAAKTVCPPHKVELEALLEKQAYKEQVLAKRLTMLELLEKYPACEMKFSEFIALLPSIRPRYYSISSSPRVDEKQASITVSVVSGPAWSGYGEYKGIASNYLAELQEGDTITCFISTDQSEFTLPKDPETPLIMVGPGTGVAPFRGFVQARKQLKEQGQSLGEAHLYFGCRSPHEDYLYQEELENAQSEGIITLHTAFSRMPNQPKTYVQHVMEQDGKKLIELLDQGAHFYICGDGSQMAPAVEATLMKSYADVHQVSEADARLWLQQLEEKGRYAKDVWAG

SEQ ID NO: 163 - DNA, 3147 bp, synthetic construct
  misc_feature 1..3147: note = Variant of cytochrome P450
  source 1..3147: mol_type = other DNA
atgacaattaaggaaatgcctcagcctaagacgtttggagaacttaaaaatttaccgttattaaacacagataaaccggttcaaacgttgatgcgtattgcggatgaattaggagaaatctttaaattcgaggcgcctggtagcgtaacgcgctttttatcaagtcagcgtctaattaaagaagcatgcgatgaatcacgctttgataaaaacttaagtcaaggccttaaatttgcacgtgattttcttggagacgggttatttacaagctggacgcatgaaccgaattggaaaaaagcgcataatatcttaggcccaagctttagtcagcgtgcaatgaaacgttatcatgcgatgatggtcgatatcgccgtgcagcttgttcaaaagtgggagcgtctaaatgcagatgagcatattgaagtatcggaagacatgacacgtttaacgctggatacaattggtctttgcggcttcaactatcgctttaacagcttttaccgagatcagcctcatccatttattgtgagtgttgtgcgtgcactggatgaagtaatgaacaagctgcagcgagcaaatccagacgacccagcttatgatgaaaacaagcgccagtgtcaagaagacatcaaggtgctgaacgactatgtcgataaaattattgcagatcgcaaagcaaggggtgaacaaagccatgatttattaacgcagatgctaaacggaaaagatccagaaacgggtgagccgcttgatgacgggaacattcgttatcaaattattacattcttaattgcgggacacgaaacaacaagtggtcttttatcatttgcgctgtatttcttagtgaaaaatccacatgtattacaaaaagtagcagaagaagcagcacgagttctagtagatcctgttccaagctacaaacaagtcaaacagcttaaatatgtcggcatggtcttaaacgaagcgctgcgcttatggccaactgctcctgcgtttggtctatatgcaaaagaagatacggtgcttggaggagaatatcctttaaccaaaggcgacgaagtaatggttctgattcctcagcttcaccgtgataaaacaatttggggagacgatgtggaggagttccgtccagagcgttttgaaaatccaagtgcgattccgcagcatgcgtttaaaccgtttggaaacggtcagcgtgcgtgtatcggtcagcagttcgctcttcatgaagcaacgctggtacttggtatgatgctaaaacactttgactttgaagatcatacaaactacgagctcgttattggcgaaaagttaacgttaaaacctgaaggctttgtggtaaaagcaaaatcgaaaggcattccgcttggcggtattccttcacctagcactgaacagtctgctaaaaaagtacgcaaaaaggcagaaaacgctcataatacgccgctgcttgtgctatacggttcaaatgcgggaacagctgaaggaacggcgcgtgatttagcagatattgcaatgagcaaaggatttgcaccgcaggtcgcaacgcttgattcacacgccggaaatcttccgcgcgaaggagctgtattaattgtaacggcgtcttataacggtcatccgcctgataacgcaaagcaatttgtcgactggttagaccaagcgtctgctgatgaagtaaaaggcgttcgctactccgtatttggatgcggcgataaaaactgggctgcgacgtatcaaaaagtgcctgcttttatcgatgaaacgcttgccgctaaaggggcagaaaacatcgctgaccgcggtgaagcagatgcaagcgacgactttgaaggcacatatgaagaatggagcgatcatatgtggagtgacgtagcagcctactttaacctcgacattgaaaacagtgaagataataaatctactctttcacttcaatttgtcgacagcgccgcggatatgccgcttgcgaaaatgcacggtgcgttttcaacgaacgtcgtagcaagcaaagaacttcaacagccaggcagtgcacgaagcacgcgacatcttgaaattgaacttccaaaagaagcttcttatcaagaaggagatcatttaggtgttattcctcgcaactatgaaggaatagtaaaccgtgtaacagcaaggttcggcctaagcgcatcacagcaaatccgtctggaagcagaagaagaaaaattagctcatttgccactcgctaaaacagtatccgtagaagagcttctgcaatacgtggagcttcaagatcctgttacgcgcacgcagcttcgcgcaatggctgctaaaacggtctgcccgccgcataaagtagagcttgaagccttgcttgaaaagcaagcctacaaagaacaagtgctggcaaaacgtttaacaatgcttgaactgcttgaaaaatacccggcgtgtgaaatgaaattcagcgaatttatcgcccttctgccaagcatacgcccgcgctattactcgatttcttcatcacctcgtgtcgatgaaaaacaagcaagcatcacggtcagcgttgtctcaggaccggcgtggagcggatatggagaatataaaggaattgcgtcgaactatcttgccgagctgcaagaaggagatacgattacgtgctttatttccacaccgcagtcagaatttacgctgccaaaagaccctgaaacgccgcttatcatggtcggaccgggaacaggcgtcgcgccgtttagaggctttgtgcaggcgcgcaaacagctaaaagaacaaggacagtcacttggagaagcacatttatacttcggctgccgttcacctcatgaagactatctgtatcaagaagagcttgaaaacgcccaaagcgaaggcatcattacgcttcataccgctttttctcgcatgccaaatcagccgaaaacatacgttcagcacgtaatggaacaagacggcaagaaattgattgaacttcttgatcaaggagcgcacttctatatttgcggagacggaagccaaatggcacctgccgttgaagcaacgcttatgaaaagctatgctgacgttcaccaagtgagtgaagcagacgctcgcttatggctgcagcagctagaagaaaaaggccgatacgcaaaagacgtgtgggctggg

SEQ ID NO: 164 - protein, 1049 aa, synthetic construct
  REGION 1..1049: note = Variant of cytochrome P450
MTIKEMPQPKTFGELKNLPLLNTDKPVQTLMRIADELGEIFKFEAPGSVTRFLSSQRLIKEACDESRFDKNLSQGLKFARDFLGDGLFTSWTHEPNWKKAHNILGPSFSQRAMKRYHAMMVDIAVQLVQKWERLNADEHIEVSEDMTRLTLDTIGLCGFNYRFNSFYRDQPHPFIVSVVRALDEVMNKLQRANPDDPAYDENKRQCQEDIKVLNDYVDKIIADRKARGEQSHDLLTQMLNGKDPETGEPLDDGNIRYQIITFLIAGHETTSGLLSFALYFLVKNPHVLQKVAEEAARVLVDPVPSYKQVKQLKYVGMVLNEALRLWPTAPAFGLYAKEDTVLGGEYPLTKGDEVMVLIPQLHRDKTIWGDDVEEFRPERFENPSAIPQHAFKPFGNGQRACIGQQFALHEATLVLGMMLKHFDFEDHTNYELVIGEKLTLKPEGFVVKAKSKGIPLGGIPSPSTEQSAKKVRKKAENAHNTPLLVLYGSNAGTAEGTARDLADIAMSKGFAPQVATLDSHAGNLPREGAVLIVTASYNGHPPDNAKQFVDWLDQASADEVKGVRYSVFGCGDKNWAATYQKVPAFIDETLAAKGAENIADRGEADASDDFEGTYEEWSDHMWSDVAAYFNLDIENSEDNKSTLSLQFVDSAADMPLAKMHGAFSTNVVASKELQQPGSARSTRHLEIELPKEASYQEGDHLGVIPRNYEGIVNRVTARFGLSASQQIRLEAEEEKLAHLPLAKTVSVEELLQYVELQDPVTRTQLRAMAAKTVCPPHKVELEALLEKQAYKEQVLAKRLTMLELLEKYPACEMKFSEFIALLPSIRPRYYSISSSPRVDEKQASITVSVVSGPAWSGYGEYKGIASNYLAELQEGDTITCFISTPQSEFTLPKDPETPLIMVGPGTGVAPFRGFVQARKQLKEQGQSLGEAHLYFGCRSPHEDYLYQEELENAQSEGIITLHTAFSRMPNQPKTYVQHVMEQDGKKLIELLDQGAHFYICGDGSQMAPAVEATLMKSYADVHQVSEADARLWLQQLEEKGRYAKDVWAG

SEQ ID NO: 165 - DNA, 3147 bp, synthetic construct
  misc_feature 1..3147: note = Variant of cytochrome P450
  source 1..3147: mol_type = other DNA
atgacaattaaggaaatgcctcagcctaagacgtttggagaacttaaaaatttaccgttattaaacacagataaaccggttcaagctttgatgcgtattgcggatgaattaggagaaatctttaaattcgaggcgcctggtagcgtaacgcgctttttatcaagtcagcgtctaattaaagaagcatgcgatgaatcacgctttgataaaaacttaagtcaaggccttaaatttgcacgtgattttcttggagacgggttatttacaagctggacgcatgaaccgaattggaaaaaagcgcataatatcttaggcccaagctttagtcagcgtgcaatgaaacgttatcatgcgatgatggtcgatatcgccgtgcagcttgttcaaaagtgggagcgtctaaatgcagatgagcatattgaagtatcggaagacatgacacgtttaacgctggatacaattggtctttgcggcttcaactatcgctttaacagcttttaccgagatcagcctcatccatttattgtgagtgttgtgcgtgcactggatgaagtaatgaacaagctgcagcgagcaaatccagacgacccagcttatgatgaaaacaagcgccagtgtcaagaagatatcaaggtgatgaacgactatgtcgataaaattattgcagatcgcaaagcaaggggtgaacaaagccatgatttattaacgcagatgctaaacggaaaagatccagaaacgggtgagccgcttgatgacgggaacattcgttatcaaattattacattcttaattgcgggacacgaaacaacaagtggtcttttatcatttgcgctgtatttcttagtgaaaaatccacatgtattacaaaaagtagcagaagaagcagcacgagttctagtagatcctgttccaagctacaaacaagtcaaacagcttaaatatgtcggcatggtcttaaacgaagcgctgcgcttatggccaactgctcctgcgttttccctatatgcaaaagaagatacggtgcttggaggagaatatcctttaaccaaaggcgacgaagtaatggttctgattcctcagcttcaccgtgataaaacaatttggggagacgatgtggaggagttccgtccagagcgttttgaaaatccaagtgcgattccgcagcatgcgtttaaaccgtttggaaacggtcagcgtgcgtgtatcggtcagcagttcgctcttcatgaagcaacgctggtacttggtatgatgctaaaacactttgactttgaagatcatacaaactacgagctcgttattaaagaaaagttaacgttaaaacctgaaggctttgtggtaaaagcaaaatcgaaaggcattccgcttggcggtattccttcacctagcactgaacagtctgctaaaaaagtacgcaaaaaggcagaaaacgctcataatacgccgctgcttgtgctatacggttcaaatgcgggaacagctgaaggaacggcgcgtgatttagcagatattgcaatgagcaaaggatttgcaccgcaggtcgcaacgcttgattcacacgccggaaatcttccgcgcgaaggagctgtattaattgtaacggcgtcttataacggtcatccgcctgataacgcaaagcaatttgtcgactggttagggcaagcgtctgctgatgaagtaaaaggcgttcgctactccgtatttggatgcggcgataaaaactgggctgcgacgtatcaaaaagtgcctgcttttatcgatgaaacgcttgccgctaaaggggcagaaaacatcgctgaccgcggtgaagcagatgcaagcgacgactttgaaggcacatatgaagaatggagtgatcatatgtggagtgacgtagcagcctactttaacctcgacattgaaaacagtgaagataataaatctactctttcacttcaatttgtcgacagcgccgcggatatgccgcttgcgaaaatgcacggtgcgttttcaacgaacgtcgtagcaagcaaagaacttcaacagccaggcagtgcacgaagcacgcgacatcttgaaattgaacttccaaaagaagcttcttatcaagaaggagatcatttaggtgttattcctcgcaactatgaaggaatagtaaaccgtgtaacagcaaggttcggcctaagcgcatcacagcaaatccgtctggaagcagaagaagaaaaattagctcatttgccactcgctaaaacagtatccgtagaagagcttctgcaatacgtggagcttcaagatcctgttacgcgcacgcagcttcgcgcaatggctgctaaaacggtctgcccgccgcataaagtagagcttgaagccttgcttgaaaagcaagcctacaaagaacaagtgctggcaaaacgtttaacaatgcttgaactgcttgaaaaatacccggcgtgtgaaatgaaattcagcgaatttatcgcccttctgccaagcatacgcccgcgctattactcgatttcttcatcacctcgtgtcgatgaaaaacaagcaagcatcacggtcagcgttgtctcaggaccggcgtggagcggatatggagaatataaaggaattgcgtcgaactatcttgccgagctgcaagaaggagatacgattacgtgctttatttccacaccgcagtcagaatttacgctgccaaaagaccctgaaacgccgcttatcatggtcggaccgggaacaggcgtcgcgccgtttagaggctttgtgcaggcgcgcaaacagctaaaagaacaaggacagtcacttggagaagcacatttatacttcggctgccgttcacctcatgaagactatctgtatcaagaagagcttgaaaacgcccaaagcgaaggcatcattacgcttcataccgctttttctcgcatgccaaatcagccgaaaacatacgttcagcacgtaatggaacaagacggcaagaaattgattgaacttcttgatcaaggagcgcacttctatatttgcggagacggaagccaaatggcacctgccgttgaagcaacgcttatgaaaagctatgctgacgttcaccaagtgagtgaagcagacgctcgcttatggctgcagcagctagaagaaaaaggccgatacgcaaaagacgtgtgggctggg

SEQ ID NO: 166 - protein, 1049 aa, synthetic construct
  REGION 1..1049: note = Variant of cytochrome P450
MTIKEMPQPKTFGELKNLPLLNTDKPVQALMRIADELGEIFKFEAPGSVTRFLSSQRLIKEACDESRFDKNLSQGLKFARDFLGDGLFTSWTHEPNWKKAHNILGPSFSQRAMKRYHAMMVDIAVQLVQKWERLNADEHIEVSEDMTRLTLDTIGLCGFNYRFNSFYRDQPHPFIVSVVRALDEVMNKLQRANPDDPAYDENKRQCQEDIKVMNDYVDKIIADRKARGEQSHDLLTQMLNGKDPETGEPLDDGNIRYQIITFLIAGHETTSGLLSFALYFLVKNPHVLQKVAEEAARVLVDPVPSYKQVKQLKYVGMVLNEALRLWPTAPAFSLYAKEDTVLGGEYPLTKGDEVMVLIPQLHRDKTIWGDDVEEFRPERFENPSAIPQHAFKPFGNGQRACIGQQFALHEATLVLGMMLKHFDFEDHTNYELVIKEKLTLKPEGFVVKAKSKGIPLGGIPSPSTEQSAKKVRKKAENAHNTPLLVLYGSNAGTAEGTARDLADIAMSKGFAPQVATLDSHAGNLPREGAVLIVTASYNGHPPDNAKQFVDWLGQASADEVKGVRYSVFGCGDKNWAATYQKVPAFIDETLAAKGAENIADRGEADASDDFEGTYEEWSDHMWSDVAAYFNLDIENSEDNKSTLSLQFVDSAADMPLAKMHGAFSTNVVASKELQQPGSARSTRHLEIELPKEASYQEGDHLGVIPRNYEGIVNRVTARFGLSASQQIRLEAEEEKLAHLPLAKTVSVEELLQYVELQDPVTRTQLRAMAAKTVCPPHKVELEALLEKQAYKEQVLAKRLTMLELLEKYPACEMKFSEFIALLPSIRPRYYSISSSPRVDEKQASITVSVVSGPAWSGYGEYKGIASNYLAELQEGDTITCFISTPQSEFTLPKDPETPLIMVGPGTGVAPFRGFVQARKQLKEQGQSLGEAHLYFGCRSPHEDYLYQEELENAQSEGIITLHTAFSRMPNQPKTYVQHVMEQDGKKLIELLDQGAHFYICGDGSQMAPAVEATLMKSYADVHQVSEADARLWLQQLEEKGRYAKDVWAG

SEQ ID NO: 167 - DNA, 3147 bp, synthetic construct
  misc_feature 1..3147: note = Variant of cytochrome P450
  source 1..3147: mol_type = other DNA
atgacaattaaggaaatgcctcagcctaagacgtttggagaacttaaaaatttaccgttattaaacacagataaaccggttcaagctttgatgcgtattgcggatgaattaggagaaatctttaaattcgaggcgcctggtagcgtaacgcgctttttatcaagtcagcgtctaattaaagaagcatgcgatgaatcacgctttgataaaaacttaagtcaaggccttaaatttgcacgtgattttcttggagacgggttatttacaagctggacgcatgaaccgaattggaaaaaagcgcataatatcttaggcccaagctttagtcagcgtgcaatgaaacgttatcatgcgatgatggtcgatatcgccgtgcagcttgttcaaaagtgggagcgtctaaatgcagatgagcatattgaagtatcggaagacatgacacgtttaacgctggatacaattggtctttgcggcttcaactatcgctttaacagcttttaccgagatcagcctcatccatttattgtgagtgttgtgcgtgcactggatgaagtaatgaacaagctgcagcgagcaaatccagacgacccagcttatgatgaaaacaagcgccagtgtcaagaagatatcaaggtgatgaacgactatgtcgataaaattattgcagatcgcaaagcaaggggtgaacaaagccatgatttattaacgcagatgctaaacggaaaagatccagaaacgggtgagccgcttgatgacgggaacattcgttatcaaattattacattcttaattgcgggacacgaaacaacaagtggtcttttatcatttgcgctgtatttcttagtgaaaaatccacatgtattacaaaaagtagcagaagaagcagcacgagttctagtagatcctgttccaagctacaaacaagtcaaacagcttaaatatgtcggcatggtcttaaacgaagcgctgcgcttatggccaactgctcctgcgttttccctatatgcaaaagaagatacggtgcttggaggagaatatcctttaaccaaaggcgacgaagtaatggttctgattcctcagcttcaccgtgataaaacaatttggggagacgatgtggaggagttccgtccagagcgttttgaaaatccaagtgcgattccgcagcatgcgtttaaaccgtttggaaacggtcagcgtgcgtgtatcggtcagcagttcgctcttcatgaagcaacgctggtacttggtatgatgctaaaacactttgactttgaagatcatacaaactacgagctcgttattaaagaaaagttaacgttaaaacctgaaggctttgtggtaaaagcaaaatcgaaaggcattccgcttggcggtattccttcacctagcactgaacagtctgctaaaaaagtacgcaaaaaggcagaaaacgctcataatacgccgctgcttgtgctatacggttcaaatgcgggaacagctgaaggaacggcgcgtgatttagcagatattgcaatgagcaaaggatttgcaccgcaggtcgcaacgcttgattcacacgccggaaatcttccgcgcgaaggagctgtattaattgtaacggcgtcttataacggtcatccgcctgataacgcaaagcaatttgtcgactggttagaccaagcgtctgctgatgaagtaaaaggcgttcgctactccgtatttggatgcggcgataaaaactgggctgcgacgtatcaaaaagtgcctgcttttatcgatgaaacgcttgccgctaaaggggcagaaaacatcgctgaccgcggtgaagcagatgcaagcgacgactttgaaggcacatatgaagaatggagtgatcatatgtggagtgacgtagcagcctactttaacctcgacattgaaaacagtgaagataataaatctactctttcacttcaatttgtcgacagcgccgcggatatgccgcttgcgaaaatgcacggtgcgttttcaacgaacgtcgtagcaagcaaagaacttcaacagccaggcagtgcacgaagcacgcgacatcttgaaattgaacttccaaaagaagcttcttatcaagaaggagatcatttaggtgttattcctcgcaactatgaaggaatagtaaaccgtgtaacagcaaggttcggcctaagcgcatcacagcaaatccgtctggaagcagaagaagaaaaattagctcatttgccactcgctaaaacagtatccgtagaagagcttctgcaatacgtggagcttcaagatcctgttacgcgcacgcagcttcgcgcaatggctgctaaaacggtctgcccgccgcataaagtagagcttgaagccttgcttgaaaagcaagcctacaaagaacaagtgctggcaaaacgtttaacaatgcttgaactgcttgaaaaatacccggcgtgtgaaatgaaattcagcgaatttatcgcccttctgccaagcatacgcccgcgctattactcgatttcttcatcacctcgtgtcgatgaaaaacaagcaagcatcacggtcagcgttgtctcaggaccggcgtggagcggatatggagaatataaaggaattgcgtcgaactatcttgccgagctgcaagaaggagatacgattacgtgctttatttccacacggcagtcagaatttacgctgccaaaagaccctgaaacgccgcttatcatggtcggaccgggaacaggcgtcgcgccgtttagaggctttgtgcaggcgcgcaaacagctaaaagaacaaggacagtcacttggagaagcacatttatacttcggctgccgttcacctcatgaagactatctgtatcaagaagagcttgaaaacgcccaaagcgaaggcatcattacgcttcataccgctttttctcgcatgccaaatcagccgaaaacatacgttcagcacgtaatggaacaagacggcaagaaattgattgaacttcttgatcaaggagcgcacttctatatttgcggagacggaagccaaatggcacctgccgttgaagcaacgcttatgaaaagctatgctgacgttcaccaagtgagtgaagcagacgctcgcttatggctgcagcagctagaagaaaaaggccgatacgcaaaagacgtgtgggctggg

SEQ ID NO: 168 - protein, 1049 aa, synthetic construct
  REGION 1..1049: note = Variant of cytochrome P450
MTIKEMPQPKTFGELKNLPLLNTDKPVQALMRIADELGEIFKFEAPGSVTRFLSSQRLIKEACDESRFDKNLSQGLKFARDFLGDGLFTSWTHEPNWKKAHNILGPSFSQRAMKRYHAMMVDIAVQLVQKWERLNADEHIEVSEDMTRLTLDTIGLCGFNYRFNSFYRDQPHPFIVSVVRALDEVMNKLQRANPDDPAYDENKRQCQEDIKVMNDYVDKIIADRKARGEQSHDLLTQMLNGKDPETGEPLDDGNIRYQIITFLIAGHETTSGLLSFALYFLVKNPHVLQKVAEEAARVLVDPVPSYKQVKQLKYVGMVLNEALRLWPTAPAFSLYAKEDTVLGGEYPLTKGDEVMVLIPQLHRDKTIWGDDVEEFRPERFENPSAIPQHAFKPFGNGQRACIGQQFALHEATLVLGMMLKHFDFEDHTNYELVIKEKLTLKPEGFVVKAKSKGIPLGGIPSPSTEQSAKKVRKKAENAHNTPLLVLYGSNAGTAEGTARDLADIAMSKGFAPQVATLDSHAGNLPREGAVLIVTASYNGHPPDNAKQFVDWLDQASADEVKGVRYSVFGCGDKNWAATYQKVPAFIDETLAAKGAENIADRGEADASDDFEGTYEEWSDHMWSDVAAYFNLDIENSEDNKSTLSLQFVDSAADMPLAKMHGAFSTNVVASKELQQPGSARSTRHLEIELPKEASYQEGDHLGVIPRNYEGIVNRVTARFGLSASQQIRLEAEEEKLAHLPLAKTVSVEELLQYVELQDPVTRTQLRAMAAKTVCPPHKVELEALLEKQAYKEQVLAKRLTMLELLEKYPACEMKFSEFIALLPSIRPRYYSISSSPRVDEKQASITVSVVSGPAWSGYGEYKGIASNYLAELQEGDTITCFISTRQSEFTLPKDPETPLIMVGPGTGVAPFRGFVQARKQLKEQGQSLGEAHLYFGCRSPHEDYLYQEELENAQSEGIITLHTAFSRMPNQPKTYVQHVMEQDGKKLIELLDQGAHFYICGDGSQMAPAVEATLMKSYADVHQVSEADARLWLQQLEEKGRYAKDVWAG

SEQ ID NO: 169 - DNA, 3147 bp, synthetic construct
  misc_feature 1..3147: note = Variant of cytochrome P450
  source 1..3147: mol_type = other DNA
atgacaattaaggaaatgcctcagcctaagacgtttggagaacttaaaaatttaccgttattaaacacagataaaccggttcaagcgttgatgcgtattgcggatgaattaggagaaatctttaaattcgaggcgcctggtagcgtaacgcgctttttatcaagtcagcgtctaattaaagaagcatgcgatgaatcacgctttgataaaaacttaagtcaaggccttaaatttgcacgtgattttcttggagacgggttatttacaagttggacgcatgaaccgaattggaaaaaagcgcataatatcttaggcccaagctttagtcagcgtgcaatgaaacgttatcatgcgatgatggtcgatatcgccgtgcagcttgttcaaaagtgggagcgtctaaatgcagatgagcatattgaagtatcggaagacatgacacgtttaacgctggatacaattggtctttgcggcttcaactatcgctttaacagcttttaccgagatcagcctcatccatttattgtgagtgttgtgcgtgcactggatgaagtaatgaacaagctgcagcgagcaaatccagacgacccagcttatgatgaaaacaagcgccagtgtcaagaagccatcaaggtgctgaacgactatgtcgataaaattattgcagatcgcaaagcaaggggtgaacaaagccatgatttattaacgcagatgctaaacggaaaagatccagaaacgggtgagccgcttgatgacgggaacattcgttatcaaattattacattcttaattgcgggacacgaaacaacaagtggtcttttatcatttgcgctgtatttcttagtgaaaaatccacatgtattacaaaaagtagcagaagaagcagcacgagttctagtagatcctgttccaagctacaaacaagtcaaacagcttaaatatgtcggcatggtcttaaacgaagcgctgcgcttatggccaactgctcctgcgttttccctatatgcaaaagaagatacggtgcttggaggagaatatcctttaaccaaaggcgacgaagtaactgttctgattcctcagcttcaccgtgataaaacaatttggggagacgatgtggaggagttccgtccagagcgttttgaaaatccaagtgcgattccgcagcatgcgtttaaaccgtttggaaacggtcagcgtgcgtgtatcggtcagcagttcgctcttcatgaagcaacgctggtacttggtatgatgctaaaacactttgactttgaagatcatacaaactacgagctcgttattagcgaaatgttaacgttaaaacctgaaggctttgtggtaaaagcaaaatcgaaaggcattccgcttggcggtattccttcacctagcactgaacagtctgctaaaaaagtacgcaaaaaggcagaaaacgctcataatacgccgctgcttgtgctatacggttcaaatgcgggaacagctgaaggaacggcgcgtgatttagcagatattgcaatgagcaaaggatttgcaccgcaggtcgcaacgcttgattcacacgccggaaatcttccgcgcgaaggagctgtattaattgtaacggcgtcttataacggtcatccgcctgataacgcaaagcaatttgtcgactggttagaccaagcgtctgctgatgaagtaaaaggcgttcgctactccgtatttggatgcggcgataaaaactgggctgcgacgtatcaaaaagtgcctgcttttatcgatgaaacgcttgccgctaaaggggcagaaaacatcgctgaccgcggtgaagcagatgcaagcgacgactttgaaggcacatatgaagaatggagcgatcatatgtggagtgacgtagcagcctactttaacctcgacattgaaaacagtgaagataataaatctactctttcacttcaatttgtcgacagcgccgcggatatgccgcttgcgaaaatgcacggtgcgttttcaacgaacgtcgtagcaagcaaagaacttcaacagccaggcagtgcacgaagcacgcgacatcttgaaattgaacttccaaaagaagcttcttatcaagaaggagatcatttaggtgttattcctcgcaactatgaaggaatagtaaaccgtgtaacagcaaggttcggcctaagcgcatcacagcaaatccgtctggaagcagaagaagaaaaattagctcatttgccactcgctaaaacagtatccgtagaagagcttctgcaatacgtggagcttcaagatcctgttacgcgcacgcagcttcgcgcaatggctgctaaaacggtctgcccgccgcataaagtagagcttgaagccttgcttgaaaagcaagcctacaaagaacaagtgctggcaaaacgtttaacaatgcttgaactgcttgaaaaatacccggcgtgtgaaatgaaattcagcgaatttatcgcccttctgccaagcatacgcccgcgctattactcgatttcttcatcacctcgtgtcgatgaaaaacaagcaagcatcacggtcagcgttgtctcaggaccggcgtggagcggatatggagaatataaaggaattgcgtcgaactatcttgccgagctgcaagaaggagatacgattacgtgctttatttccacaccgcagtcagaatttacgctgccaaaagaccctgaaacgccgcttatcatggtcggaccgggaacaggcgtcgcgccgtttagaggctttgtgcaggcgcgcaaacagctaaaagaacaaggacagtcacttggagaagcacatttatacttcggctgccgttcacctcatgaagactatctgtatcaagaagagcttgaaaacgcccaaagcgaaggcatcattacgcttcataccgctttttctcgcatgccaaatcagccgaaaacatacgttcagcacgtaatggaacaagacggcaagaaattgattgaacttcttgatcaaggagcgcacttctatatttgcggagacggaagccaaatggcacctgccgttgaagcaacgcttatgaaaagctatgctgacgttcaccaagtgagtgaagcagacgctcgcttatggctgcagcagctagaagaaaaaggccgatacgcaaaagacgtgtgggctggg

SEQ ID NO: 170 - protein, 1049 aa, synthetic construct
  REGION 1..1049: note = Variant of cytochrome P450
MTIKEMPQPKTFGELKNLPLLNTDKPVQALMRIADELGEIFKFEAPGSVTRFLSSQRLIKEACDESRFDKNLSQGLKFARDFLGDGLFTSWTHEPNWKKAHNILGPSFSQRAMKRYHAMMVDIAVQLVQKWERLNADEHIEVSEDMTRLTLDTIGLCGFNYRFNSFYRDQPHPFIVSVVRALDEVMNKLQRANPDDPAYDENKRQCQEAIKVLNDYVDKIIADRKARGEQSHDLLTQMLNGKDPETGEPLDDGNIRYQIITFLIAGHETTSGLLSFALYFLVKNPHVLQKVAEEAARVLVDPVPSYKQVKQLKYVGMVLNEALRLWPTAPAFSLYAKEDTVLGGEYPLTKGDEVTVLIPQLHRDKTIWGDDVEEFRPERFENPSAIPQHAFKPFGNGQRACIGQQFALHEATLVLGMMLKHFDFEDHTNYELVISEMLTLKPEGFVVKAKSKGIPLGGIPSPSTEQSAKKVRKKAENAHNTPLLVLYGSNAGTAEGTARDLADIAMSKGFAPQVATLDSHAGNLPREGAVLIVTASYNGHPPDNAKQFVDWLDQASADEVKGVRYSVFGCGDKNWAATYQKVPAFIDETLAAKGAENIADRGEADASDDFEGTYEEWSDHMWSDVAAYFNLDIENSEDNKSTLSLQFVDSAADMPLAKMHGAFSTNVVASKELQQPGSARSTRHLEIELPKEASYQEGDHLGVIPRNYEGIVNRVTARFGLSASQQIRLEAEEEKLAHLPLAKTVSVEELLQYVELQDPVTRTQLRAMAAKTVCPPHKVELEALLEKQAYKEQVLAKRLTMLELLEKYPACEMKFSEFIALLPSIRPRYYSISSSPRVDEKQASITVSVVSGPAWSGYGEYKGIASNYLAELQEGDTITCFISTPQSEFTLPKDPETPLIMVGPGTGVAPFRGFVQARKQLKEQGQSLGEAHLYFGCRSPHEDYLYQEELENAQSEGIITLHTAFSRMPNQPKTYVQHVMEQDGKKLIELLDQGAHFYICGDGSQMAPAVEATLMKSYADVHQVSEADARLWLQQLEEKGRYAKDVWAG

SEQ ID NO: 171 - DNA, 3147 bp, synthetic construct
  misc_feature 1..3147: note = Variant of cytochrome P450
  source 1..3147: mol_type = other DNA
atgacaattaaggaaatgcctcagcctaagacgtttggagaacttaaaaatttaccgttattaaacacagataaaccggttcaagcgttgatgcgtattgcggatgaattaggagaaatctttaaattcgaggcgcctggtagcgtaacgcgctttttatcaagtcagcgtctaattaaagaagcatgcgatgaatcacgctttgataaaaacttaagtcaaggccttaaatttgcacgtgattttcttggagacgggttatttacaagctggacgcatgaaccgaattggaaaaaagcgcataatatcttaggcccaagctttagtcagcgtgcaatgaaacgttatcatgcgatgatggtcgatatcgccgtgcagcttgttcaaaagtgggagcgtctaaatgcagatgagcatattgaagtatcggaagacatgacacgtttaacgctggatacaattggtctttgcggcttcaactatcgctttaacagcttttaccgagatcagcctcatccatttattgtgagtgttgtgcgtgcactggatgaagtaatgaacaagctgcagcgagcaaatccagacgacccagcttatgatgaaaacaagcgccagtgtcaagaagccgccaaggtgatgaacgactatgtcgataaaattattgcagatcgcaaagcaaggggtgaacaaagccatgatttattaacgcagatgctaaacggaaaagatccagaaacgggtgagccgcttgatgacgggaacattcgttatcaagtcattacattcttaattgcgggacacgaaacaacaagtggtcttttatcatttgcgctgtatttcttagtgaaaaatccacatgtattacaaaaagtagcagaagaagcagcacgagttctagtagatcctgttccaagctacaaacaagtcaaacagcttaaatatgtcggcatggtcttaaacgaagcgctgcgcttatggccaactgctcctgcgttttccctatatgcaaaagaagatacggtgcttggaggagaatatcctttaaccaaaggcgacgaagtaatggttctgattcctcagcttcaccgtgataaaacaatttggggagacgatgtggaggagttccgtccagagcgttttgaaaatccaagtgcgattccgcagcatgcgtttaaaccgtttggaaacggtcagcgtgcgtgtatcggtcagcagttcgctcttcatgaagcaacgctggtacttggtatgatgctaaaacactttgactttgaagatcatacaaactacgagctcgttattggcgaaaagttaacgttaaaacctgaaggctttgtggtaaaagcaaaatcgaaaggcattccgcttggcggtattccttcacctagcactgaacagtctgctaaaaaagtacgcaaaaaggcagaaaacgctcataatacgccgctgcttgtgctatacggttcaaatgcgggaacagctgaaggaacggcgcgtgatttagcagatattgcaatgagcaaaggatttgcaccgcaggtcgcaacgcttgattcacacgccggaaatcttccgcgcgaaggagctgtattaattgtaacggcgtcttataacggtcatccgcctgataacgcaaagcaatttgtcgactggttagaccaagcgtctgctgatgaagtaaaaggcgttcgctactccgtatttggatgcggcgataaaaactgggctgcgacgtatcaaaaagtgcctgcttttatcgatgaaacgcttgccgctaaaggggcagaaaacatcgctgaccgcggtgaagcagatgcaagcgacgactttgaaggcacatatgaagaatggagcgatcatatgtggagtgacgtagcagcctactttaacctcgacattgaaaacagtgaagataataaatctactctttcacttcaatttgtcgacagcgccgcggatatgccgcttgcgaaaatgcacggtgcgttttcaacgaacgtcgtagcaagcaaagaacttcaacagccaggcagtgcacgaagcacgcgacatcttgaaattgaacttccaaaagaagcttcttatcaagaaggagatcatttaggtgttattcctcgcaactatgaaggaatagtaaaccgtgtaacagcaaggttcggcctaagcgcatcacagcaaatccgtctggaagcagaagaagaaaaattagctcatttgccactcgctaaaacagtatccgtagaagagcttctgcaatacgtggagcttcaagatcctgttacgcgcacgcagcttcgcgcaatggctgctaaaacggtctgcccgccgcataaagtagagcttgaagccttgcttgaaaagcaagcctacaaagaacaagtgctggcaaaacgtttaacaatgcttgaactgcttgaaaaatacccggcgtgtgaaatgaaattcagcgaatttatcgcccttctgccaagcatacgcccgcgctattactcgatttcttcatcacctcgtgtcgatgaaaaacaagcaagcatcacggtcagcgttgtctcaggaccggcgtggagcggatatggagaatataaaggaattgcgtcgaactatcttgccgagctgcaagaaggagatacgattacgtgctttatttccacaccgcagtcagaatttacgctgccaaaagaccctgaaacgccgcttatcatggtcggaccgggaacaggcgtcgcgccgtttagaggctttgtgcaggcgcgcaaacagctaaaagaacaaggacagtcacttggagaagcacatttatacttcggctgccgttcacctcatgaagactatctgtatcaagaagagcttgaaaacgcccaaagcgaaggcatcattacgcttcataccgctttttctcgcatgccaaatcagccgaaaacatacgttcagcacgtaatggaacaagacggcaagaaattgattgaacttcttgatcaaggagcgcacttctatatttgcggagacggaagccaaatggcacctgccgttgaagcaacgcttatgaaaagctatgctgacgttcaccaagtgagtgaagcagacgctcgcttatggctgcagcagctagaagaaaaaggccgatacgcaaaagacgtgtgggctggg

SEQ ID NO: 172 - protein, 1049 aa, synthetic construct
  REGION 1..1049: note = Variant of cytochrome P450
MTIKEMPQPKTFGELKNLPLLNTDKPVQALMRIADELGEIFKFEAPGSVTRFLSSQRLIKEACDESRFDKNLSQGLKFARDFLGDGLFTSWTHEPNWKKAHNILGPSFSQRAMKRYHAMMVDIAVQLVQKWERLNADEHIEVSEDMTRLTLDTIGLCGFNYRFNSFYRDQPHPFIVSVVRALDEVMNKLQRANPDDPAYDENKRQCQEAAKVMNDYVDKIIADRKARGEQSHDLLTQMLNGKDPETGEPLDDGNIRYQVITFLIAGHETTSGLLSFALYFLVKNPHVLQKVAEEAARVLVDPVPSYKQVKQLKYVGMVLNEALRLWPTAPAFSLYAKEDTVLGGEYPLTKGDEVMVLIPQLHRDKTIWGDDVEEFRPERFENPSAIPQHAFKPFGNGQRACIGQQFALHEATLVLGMMLKHFDFEDHTNYELVIGEKLTLKPEGFVVKAKSKGIPLGGIPSPSTEQSAKKVRKKAENAHNTPLLVLYGSNAGTAEGTARDLADIAMSKGFAPQVATLDSHAGNLPREGAVLIVTASYNGHPPDNAKQFVDWLDQASADEVKGVRYSVFGCGDKNWAATYQKVPAFIDETLAAKGAENIADRGEADASDDFEGTYEEWSDHMWSDVAAYFNLDIENSEDNKSTLSLQFVDSAADMPLAKMHGAFSTNVVASKELQQPGSARSTRHLEIELPKEASYQEGDHLGVIPRNYEGIVNRVTARFGLSASQQIRLEAEEEKLAHLPLAKTVSVEELLQYVELQDPVTRTQLRAMAAKTVCPPHKVELEALLEKQAYKEQVLAKRLTMLELLEKYPACEMKFSEFIALLPSIRPRYYSISSSPRVDEKQASITVSVVSGPAWSGYGEYKGIASNYLAELQEGDTITCFISTPQSEFTLPKDPETPLIMVGPGTGVAPFRGFVQARKQLKEQGQSLGEAHLYFGCRSPHEDYLYQEELENAQSEGIITLHTAFSRMPNQPKTYVQHVMEQDGKKLIELLDQGAHFYICGDGSQMAPAVEATLMKSYADVHQVSEADARLWLQQLEEKGRYAKDVWAG

SEQ ID NO: 173 - DNA, 3147 bp, synthetic construct
  misc_feature 1..3147: note = Variant of cytochrome P450
  source 1..3147: mol_type = other DNA
atgacaattaaggaaatgcctcagcctaagacgtttggagaacttaaaaatttaccgttattaaacacagataaaccggttcaagctttgatgcgtattgcggatgaattaggagaaatctttaaattcgaggcgcctggtagcgtaacgcgctttttatcaagtcagcgtctaattaaagaagcatgcgatgaatcacgctttgataaaaacttaagtcaaggccttaaatttgcacgtgattttcttggagacgggttatttacaagctggacgcatgaaccgaattggaaaaaagcgcataatatcttaggcccaagctttagtcagcgtgcaatgaaacgttatcatgcgatgatggtcgatatcgccgtgcagcttgttcaaaagtgggagcgtctaaatgcagatgagcatattgaagtatcggaagacatgacacgtttaacgctggatacaattggtctttgcggcttcaactatcgctttaacagcttttaccgagatcagcctcatccatttattgtgagtgttgtgcgtgcactggatgaagtaatgaacaagctgcagcgagcaaatccagacgacccagcttatgatgaaaacaagcgccagtgtcaagaagatatcaaggtgatgaacgactatgtcgataaaattattgcagatcgcaaagcaaggggtgaacaaagccatgatttattaacgcagatgctaaacggaaaagatccagaaacgggtgagccgcttgatgacgggaacattcgttatcaaattattacattcttaattgcgggacacgaaacaacaagtggtcttttatcatttgcgctgtatttcttagtgaaaaatccacatgtattacaaaaagtagcagaagaagcagcacgagttctagtagatcctgttccaagctacaaacaagtcaaacagcttaaatatgtcggcatggtcttaaacgaagcgctgcgcttatggccaactgctcctgcgttttccctatatgcaaaagaagatacggtgcttggaggagaatatcctttaaccaaaggcgacgaagtaatggttctgattcctcagcttcaccgtgataaaacaatttggggagacgatgtggaggagttccgtccagagcgttttgaaaatccaagtgcgattccgcagcatgcgtttaaaccgtttggaaacggtcagcgtgcgtgtatcggtcagcagttcgctcttcatgaagcaacgctggtacttggtatgatgctaaaacactttgactttgaagatcatacaaactacgagctcgttattaaagaaaagttaacgttaaaacctgaaggctttgtggtaaaagcaaaatcgaaaggcattccgcttggcggtattccttcacctagcactgaacagtctgctaaaaaagtacgcaaaaaggcagaaaacgctcataatacgccgctgcttgtgctatacggttcaaatgcgggaacagctgaaggaacggcgcgtgatttagcagatattgcaatgagcaaaggatttgcaccgcaggtcgcaacgcttgattcacacgccggaaatcttccgcgcgaaggagctgtattaattgtaacggcgtcttataacggtcatccgcctgataacgcaaagcaatttgtcgactggttagaccaagcgtctgctgatgaagtaaaaggcgttcgctactccgtatttggatgcggcgataaaaactgggctgcgacgtatcaaaaagtgcctgcttttatcgatgaaacgcttgccgctaaaggggcagaaaacatcgctgaccgcggtgaagcagatgcaagcgacgactttgaaggcacatatgaagaatggagtgatcatatgtggagtgacgtagcagcctactttaacctcgacattgaaaacagtgaagataataaatctactctttcacttcaatttgtcgacagcgccgcggatatgccgcttgcgaaaatgcacggtgcgttttcaacgaacgtcgtagcaagcaaagaacttcaacagccaggcagtgcacgaagcacgcgacatcttgaaattgaacttccaaaagaagcttcttatcaagaaggagatcatttaggtgttattcctcgcaactatgaaggaatagtaaaccgtgtaacagcaaggttcggcctaagcgcatcacagcaaatccgtctggaagcagaagaagaaaaattagctcatttgccactcgctaaaacagtatccgtagaagagcttctgcaatacgtggagcttcaagatcctgttacgcgcacgcagcttcgcgcaatggctgctaaaacggtctgcccgccgcataaagtagagcttgaagccttgcttgaaaagcaagcctacaaagaacaagtgctggcaaaacgtttaacaatgcttgaactgcttgaaaaatacccggcgtgtgaaatgaaattcagcgaatttatcgcccttctgccaagcatacgcccgcgctattactcgatttcttcatcacctcgtgtcgatgaaaaacaagcaagcatcacggtcagcgttgtctcaggaccggcgtggagcggatatggagaatataaaggaattgcgtcgaactatcttgccgagctgcaagaaggagatacgattacgtgctttatttccacaccgcagtcagggtttacgctgccaaaagaccctgaaacgccgcttatcatggtcggaccgggaacaggcgtcgcgccgtttagaggctttgtgcaggcgcgcaaacagctaaaagaacaaggacagtcacttggagaagcacatttatacttcggctgccgttcacctcatgaagactatctgtatcaagaagagcttgaaaacgcccaaagcgaaggcatcattacgcttcataccgctttttctcgcatgccaaatcagccgaaaacatacgttcagcacgtaatggaacaagacggcaagaaattgattgaacttcttgatcaaggagcgcacttctatatttgcggagacggaagccaaatggcacctgccgttgaagcaacgcttatgaaaagctatgctgacgttcaccaagtgagtgaagcagacgctcgcttatggctgcagcagctagaagaaaaaggccgatacgcaaaagacgtgtgggctggg

SEQ ID NO: 174 - protein, 1049 aa, synthetic construct
  REGION 1..1049: note = Variant of cytochrome P450
MTIKEMPQPKTFGELKNLPLLNTDKPVQALMRIADELGEIFKFEAPGSVTRFLSSQRLIKEACDESRFDKNLSQGLKFARDFLGDGLFTSWTHEPNWKKAHNILGPSFSQRAMKRYHAMMVDIAVQLVQKWERLNADEHIEVSEDMTRLTLDTIGLCGFNYRFNSFYRDQPHPFIVSVVRALDEVMNKLQRANPDDPAYDENKRQCQEDIKVMNDYVDKIIADRKARGEQSHDLLTQMLNGKDPETGEPLDDGNIRYQIITFLIAGHETTSGLLSFALYFLVKNPHVLQKVAEEAARVLVDPVPSYKQVKQLKYVGMVLNEALRLWPTAPAFSLYAKEDTVLGGEYPLTKGDEVMVLIPQLHRDKTIWGDDVEEFRPERFENPSAIPQHAFKPFGNGQRACIGQQFALHEATLVLGMMLKHFDFEDHTNYELVIKEKLTLKPEGFVVKAKSKGIPLGGIPSPSTEQSAKKVRKKAENAHNTPLLVLYGSNAGTAEGTARDLADIAMSKGFAPQVATLDSHAGNLPREGAVLIVTASYNGHPPDNAKQFVDWLDQASADEVKGVRYSVFGCGDKNWAATYQKVPAFIDETLAAKGAENIADRGEADASDDFEGTYEEWSDHMWSDVAAYFNLDIENSEDNKSTLSLQFVDSAADMPLAKMHGAFSTNVVASKELQQPGSARSTRHLEIELPKEASYQEGDHLGVIPRNYEGIVNRVTARFGLSASQQIRLEAEEEKLAHLPLAKTVSVEELLQYVELQDPVTRTQLRAMAAKTVCPPHKVELEALLEKQAYKEQVLAKRLTMLELLEKYPACEMKFSEFIALLPSIRPRYYSISSSPRVDEKQASITVSVVSGPAWSGYGEYKGIASNYLAELQEGDTITCFISTPQSGFTLPKDPETPLIMVGPGTGVAPFRGFVQARKQLKEQGQSLGEAHLYFGCRSPHEDYLYQEELENAQSEGIITLHTAFSRMPNQPKTYVQHVMEQDGKKLIELLDQGAHFYICGDGSQMAPAVEATLMKSYADVHQVSEADARLWLQQLEEKGRYAKDVWAG

SEQ ID NO: 175 - DNA, 3147 bp, synthetic construct
  misc_feature 1..3147: note = Variant of cytochrome P450
  source 1..3147: mol_type = other DNA
atgacaattaaggaaatgcctcagcctaagacgtttggagaacttaaaaatttaccgttattaaacacagataaaccggttcaaacgttgatgcgtattgcggatgaattaggagaaatctttaaattcgaggcgcctggtagcgtaacgcgctttttatcaagtcagcgtctaattaaagaagcatgcgatgaatcacgctttgataaaaacttaagtcaaggccttaaatttgcacgtgattttcttggagacgggttatttacaagttggacgcatgaaccgaattggaaaaaagcgcataatatcttaggcccaagctttagtcagcgtgcaatgaaacgttatcatgcgatgatggtcgatatcgccgtgcagcttgttcaaaagtgggagcgtctaaatgcagatgagcatattgaagtatcggaagacatgacacgtttaacgctggatacaattggtctttgcggcttcaactatcgctttaacagcttttaccgagatcagcctcatccatttattgtgagtgttgtgcgtgcactggatgaagtaatgaacaagctgcagcgagcaaatccagacgacccagcttatgatgaaaacaagcgccagtgtcaagaagccgccaaggtgatgaacgactatgtcgataaaattattgcagatcgcaaagcaaggggtgaacaaagccatgatttattaacgcagatgctaaacggaaaagatccagaaacgggtgagccgcttgatgacgggaacattcgttatcaaattattacattcttaattgcgggacacgaaacaacaagtggtcttttatcatttgcgctgtatttcttagtgaaaaatccacatgtattacaaaaagtagcagaagaagcagcacgagttctagtagatcctgttccaagctacaaacaagtcaaacagcttaaatatgtcggcatggtcttaaacgaagcgctgcgcttatggccaactgctcctgcgtttagtctatatgcaaaagaagatacggtgcttggaggagaatatcctttaaccaaaggcgacgaagtaatggttctgattcctcagcttcaccgtgataaaacaatttggggagacgatgtggaggagttccgtccagagcgttttgaaaatccaagtgcgattccgcagcatgcgtttaaaccgtttggaaacggtcagcgtgcgtgtatcggtcagcagttcgctcttcatgaagcaacgctggtacttggtatgatgctaaaacactttgactttgaagatcatacaaactacgagctcgttattggcgaaatgttaacgttaaaacctgaaggctttgtggtaaaagcaaaatcgaaaggcattccgcttggcggtattccttcacctagcactgaacagtctgctaaaaaagtacgcaaaaaggcagaaaacgctcataatacgccgctgcttgtgctatacggttcaaatgcgggaacagctgaaggaacggcgcgtgatttagcagatattgcaatgagcaaaggatttgcaccgcaggtcgcaacgcttgattcacacgccggaaatcttccgcgcgaaggagctgtattaattgtaacggcgtcttataacggtcatccgcctgataacgcaaagcaatttgtcgactggttagaccaagcgtctgctgatgaagtaaaaggcgttcgctactccgtatttggatgcggcgataaaaactgggctgcgacgtatcaaaaagtgcctgcttttatcgatgaaacgcttgccgctaaaggggcagaaaacatcgctgaccgcggtgaagcagatgcaagcgacgactttgaaggcacatatgaagaatggagcgatcatatgtggagtgacgtagcagcctactttaacctcgacattgaaaacagtgaagataataaatctactctttcacttcaatttgtcgacagcgccgcggatatgccgcttgcgaaaatgcacggtgcgttttcaacgaacgtcgtagcaagcaaagaacttcaacagccaggcagtgcacgaagcacgcgacatcttgaaattgaacttccaaaagaagcttcttatcaagaaggagatcatttaggtgttattcctcgcaactatgaaggaatagtaaaccgtgtaacagcaaggttcggcctaagcgcatcacagcaaatccgtctggaagcagaagaagaaaaattagctcatttgccactcgctaaaacagtatccgtagaagagcttctgcaatacgtggagcttcaagatcctgttacgcgcacgcagcttcgcgcaatggctgctaaaacggtctgcccgccgcataaagtagagcttgaagccttgcttgaaaagcaagcctacaaagaacaagtgctggcaaaacgtttaacaatgcttgaactgcttgaaaaatacccggcgtgtgaaatgaaattcagcgaatttatcgcccttctgccaagcatacgcccgcgctattactcgatttcttcatcacctcgtgtcgatgaaaaacaagcaagcatcacggtcagcgttgtctcaggaccggcgtggagcggatatggagaatataaaggaattgcgtcgaactatcttgccgagctgcaagaaggagatacgattacgtgctttatttccacaccgcagtcagaatttacgctgccaaaagaccctgaaacgccgcttatcatggtcggaccgggaacaggcgtcgcgccgtttagaggctttgtgcaggcgcgcaaacagctaaaagaacaaggacagtcacttggagaagcacatttatacttcggctgccgttcacctcatgaagactatctgtatcaagaagagcttgaaaacgcccaaagcgaaggcatcattacgcttcataccgctttttctcgcatgccaaatcagccgaaaacatacgttcagcacgtaatggaacaagacggcaagaaattgattgaacttcttgatcaaggagcgcacttctatatttgcggagacggaagccaaatggcacctgccgttgaagcaacgcttatgaaaagctatgctgacgttcaccaagtgagtgaagcagacgctcgcttatggctgcagcagctagaagaaaaaggccgatacgcaaaagacgtgtgggctggg

SEQ ID NO: 176 - protein, 1049 aa, synthetic construct
  REGION 1..1049: note = Variant of cytochrome P450
MTIKEMPQPKTFGELKNLPLLNTDKPVQTLMRIADELGEIFKFEAPGSVTRFLSSQRLIKEACDESRFDKNLSQGLKFARDFLGDGLFTSWTHEPNWKKAHNILGPSFSQRAMKRYHAMMVDIAVQLVQKWERLNADEHIEVSEDMTRLTLDTIGLCGFNYRFNSFYRDQPHPFIVSVVRALDEVMNKLQRANPDDPAYDENKRQCQEAAKVMNDYVDKIIADRKARGEQSHDLLTQMLNGKDPETGEPLDDGNIRYQIITFLIAGHETTSGLLSFALYFLVKNPHVLQKVAEEAARVLVDPVPSYKQVKQLKYVGMVLNEALRLWPTAPAFSLYAKEDTVLGGEYPLTKGDEVMVLIPQLHRDKTIWGDDVEEFRPERFENPSAIPQHAFKPFGNGQRACIGQQFALHEATLVLGMMLKHFDFEDHTNYELVIGEMLTLKPEGFVVKAKSKGIPLGGIPSPSTEQSAKKVRKKAENAHNTPLLVLYGSNAGTAEGTARDLADIAMSKGFAPQVATLDSHAGNLPREGAVLIVTASYNGHPPDNAKQFVDWLDQASADEVKGVRYSVFGCGDKNWAATYQKVPAFIDETLAAKGAENIADRGEADASDDFEGTYEEWSDHMWSDVAAYFNLDIENSEDNKSTLSLQFVDSAADMPLAKMHGAFSTNVVASKELQQPGSARSTRHLEIELPKEASYQEGDHLGVIPRNYEGIVNRVTARFGLSASQQIRLEAEEEKLAHLPLAKTVSVEELLQYVELQDPVTRTQLRAMAAKTVCPPHKVELEALLEKQAYKEQVLAKRLTMLELLEKYPACEMKFSEFIALLPSIRPRYYSISSSPRVDEKQASITVSVVSGPAWSGYGEYKGIASNYLAELQEGDTITCFISTPQSEFTLPKDPETPLIMVGPGTGVAPFRGFVQARKQLKEQGQSLGEAHLYFGCRSPHEDYLYQEELENAQSEGIITLHTAFSRMPNQPKTYVQHVMEQDGKKLIELLDQGAHFYICGDGSQMAPAVEATLMKSYADVHQVSEADARLWLQQLEEKGRYAKDVWAG

SEQ ID NO: 177 - DNA, 3147 bp, synthetic construct
  misc_feature 1..3147: note = Variant of cytochrome P450
  source 1..3147: mol_type = other DNA
atgacaattaaggaaatgcctcagcctaagacgtttggagaacttaaaaatttaccgttattaaacacagataaaccggttcaagctttgatgcgtattgcggatgaattaggagaaatctttaaattcgaggcgcctggtagcgtaacgcgctttttatcaagtcagcgtctaattaaagaagcatgcgatgaatcacgctttgataaaaacttaagtcaaggccttaaatttgcacgtgattttcttggagacgggttatttacaagctggacgcatgaaccgaattggaaaaaagcgcataatatcttaggcccaagctttagtcagcgtgcaatgaaacgttatcatgcgatgatggtcgatatcgccgtgcagcttgttcaaaagtgggagcgtctaaatgcagatgagcatattgaagtatcggaagacatgacacgtttaacgctggatacaattggtctttgcggcttcaactatcgctttaacagcttttaccgagatcagcctcatccatttattgtgagtgttgtgcgtgcactggatgaagtaatgaacaagctgcagcgagcaaatccagacgacccagcttatgatgaaaacaagcgccagtgtcaagaagatatcaaggtgatgaacgactatgtcgataaaattattgcagatcgcaaagcaaggggtgaacaaagccatgatttattaacgcagatgctaaacggaaaagatccagaaacgggtgagccgcttgatgacgggaacattcgttatcaaattattacattcttaattgcgggacacgaaacaacaagtggtcttttatcatttgcgctgtatttcttagtgaaaaatccacatgtattacaaaaagtagcagaagaagcagcacgagttctagtagatcctgttccaagctacaaacaagtcaaacagcttaaatatgtcggcatggtcttaaacgaagcgctgcgcttatggccaactgctcctgcgttttccctatatgcaaaagaagatacggtgcttggaggagaatatcctttaaccaaaggcgacgaagtaatggttctgattcctcagcttcaccgtgataaaacaatttggggagacgatgtggaggagttccgtccagagcgttttgaaaatccaagtgcgattccgcagcatgcgtttaaaccgtttggaaacggtcagcgtgcgtgtatcggtcagcagttcgctcttcatgaagcaacgctggtacttggtatgatgctaaaacactttgactttgaagatcatacaaactacgagctcgttattaaagaaaagttaacgttaaaacctgaaggctttgtggtaaaagcaaaatcgaaaggcattccgcttggcggtattccttcacctagcactgaacagtctgctaaaaaagtacgcaaaaaggcagaaaacgctcataatacgccgctgcttgtgctatacggttcaaatgcgggaacagctgaaggaacggcgcgtgatttagcagatattgcaatgagcaaaggatttgcaccgcaggtcgcaacgcttgattcacacgccggaaatcttccgcgcgaaggagctgtattaattgtaacggcgtcttataacggtcatccgcctgataacgcaaagcaatttgtcgactggttagaccaagcgtctgctgatgaagtaaaaggcgttcgctactccgtatttggatgcggcgataaaaactgggctgcgacgtatcaaaaagtgcctgcttttatcgatgaaacgcttgccgctaaaggggcagaaaacatcgctgaccgcggtgaagcagatgcaagcgacgactttgaaggcacatatgaagaatggcgtgatcatatgtggagtgacgtagcagcctactttaacctcgacattgaaaacagtgaagataataaatctactctttcacttcaatttgtcgacagcgccgcggatatgccgcttgcgaaaatgcacggtgcgttttcaacgaacgtcgtagcaagcaaagaacttcaacagccaggcagtgcacgaagcacgcgacatcttgaaattgaacttccaaaagaagcttcttatcaagaaggagatcatttaggtgttattcctcgcaactatgaaggaatagtaaaccgtgtaacagcaaggttcggcctaagcgcatcacagcaaatccgtctggaagcagaagaagaaaaattagctcatttgccactcgctaaaacagtatccgtacaggagcttctgcaatacgtggagcttcaagatcctgttacgcgcacgcagcttcgcgcaatggctgctaaaacggtctgcccgccgcataaagtagagcttgaagccttgcttgaaaagcaagcctacaaagaacaagtgctggcaaaacgtttaacaatgcttgaactgcttgaaaaatacccggcgtgtgaaatgaaattcagcgaatttatcgcccttctgccaagcatacgcccgcgctattactcgatttcttcatcacctcgtgtcgatgaaaaacaagcaagcatcacggtcagcgttgtctcaggaccggcgtggagcggatatggagaatataaaggaattgcgtcgaactatcttgccgagctgcaagaaggagatacgattacgtgctttatttccacaccgcagtcagaatttacgctgccaaaagaccctgaaacgccgcttatcatggtcggaccgggaacaggcgtcgcgccgtttagaggctttgtgcaggcgcgcaaacagctaaaagaacaaggacagtcacttggagaagcacatttatacttcggctgccgttcacctcatgaagactatctgtatcaagaagagcttgaaaacgcccaaagcgaaggcatcattacgcttcataccgctttttctcgcatgccaaatcagccgaaaacatacgttcagcacgtaatggaacaagacggcaagaaattgattgaacttcttgatcaaggagcgcacttctatatttgcggagacggaagccaaatggcacctgccgttgaagcaacgcttatgaaaagctatgctgacgttcaccaagtgagtgaagcagacgctcgcttatggctgcagcagctagaagaaaaaggccgatacgcaaaagacgtgtgggctggg

SEQ ID NO: 178 - protein, 1049 aa, synthetic construct
  REGION 1..1049: note = Variant of cytochrome P450
MTIKEMPQPKTFGELKNLPLLNTDKPVQALMRIADELGEIFKFEAPGSVTRFLSSQRLIKEACDESRFDKNLSQGLKFARDFLGDGLFTSWTHEPNWKKAHNILGPSFSQRAMKRYHAMMVDIAVQLVQKWERLNADEHIEVSEDMTRLTLDTIGLCGFNYRFNSFYRDQPHPFIVSVVRALDEVMNKLQRANPDDPAYDENKRQCQEDIKVMNDYVDKIIADRKARGEQSHDLLTQMLNGKDPETGEPLDDGNIRYQIITFLIAGHETTSGLLSFALYFLVKNPHVLQKVAEEAARVLVDPVPSYKQVKQLKYVGMVLNEALRLWPTAPAFSLYAKEDTVLGGEYPLTKGDEVMVLIPQLHRDKTIWGDDVEEFRPERFENPSAIPQHAFKPFGNGQRACIGQQFALHEATLVLGMMLKHFDFEDHTNYELVIKEKLTLKPEGFVVKAKSKGIPLGGIPSPSTEQSAKKVRKKAENAHNTPLLVLYGSNAGTAEGTARDLADIAMSKGFAPQVATLDSHAGNLPREGAVLIVTASYNGHPPDNAKQFVDWLDQASADEVKGVRYSVFGCGDKNWAATYQKVPAFIDETLAAKGAENIADRGEADASDDFEGTYEEWRDHMWSDVAAYFNLDIENSEDNKSTLSLQFVDSAADMPLAKMHGAFSTNVVASKELQQPGSARSTRHLEIELPKEASYQEGDHLGVIPRNYEGIVNRVTARFGLSASQQIRLEAEEEKLAHLPLAKTVSVQELLQYVELQDPVTRTQLRAMAAKTVCPPHKVELEALLEKQAYKEQVLAKRLTMLELLEKYPACEMKFSEFIALLPSIRPRYYSISSSPRVDEKQASITVSVVSGPAWSGYGEYKGIASNYLAELQEGDTITCFISTPQSEFTLPKDPETPLIMVGPGTGVAPFRGFVQARKQLKEQGQSLGEAHLYFGCRSPHEDYLYQEELENAQSEGIITLHTAFSRMPNQPKTYVQHVMEQDGKKLIELLDQGAHFYICGDGSQMAPAVEATLMKSYADVHQVSEADARLWLQQLEEKGRYAKDVWAG

SEQ ID NO: 179 - DNA, 3147 bp, synthetic construct
  misc_feature 1..3147: note = Variant of cytochrome P450
  source 1..3147: mol_type = other DNA
atgacaattaaggaaatgcctcagcctaagacgtttggagaacttaaaaatttaccgttattaaacacagataaaccggttcaagctttgatgcgtattgcggatgaattaggagaaatctttaaattcgaggcgcctggtagcgtaacgcgctttttatcaagtcagcgtctaattaaagaagcatgcgatgaatcacgctttgataaaaacttaagtcaaggccttaaatttgcacgtgattttcttggagacgggttatttacaagctggacgcatgaaccgaattggaaaaaagcgcataatatcttaggcccaagctttagtcagcgtgcaatgaaacgttatcatgcgatgatggtcgatatcgccgtgcagcttgttcaaaagtgggagcgtctaaatgcagatgagcatattgaagtatcggaagacatgacacgtttaacgctggatacaattggtctttgcggcttcaactatcgctttaacagcttttaccgagatcagcctcatccatttattgtgagtgttgtgcgtgcactggatgaagtaatgaacaagctgcagcgagcaaatccagacgacccagcttatgatgaaaacaagcgccagtgtcaagaagatatcaaggtgatgaacgactatgtcgataaaattattgcagatcgcaaagcaaggggtgaacaaagccatgatttattaacgcagatgctaaacggaaaagatccagaaacgggtgagccgcttgatgacgggaacattcgttatcaaattattacattcttaattgcgggacacgaaacaacaagtggtcttttatcatttgcgctgtatttcttagtgaaaaatccacatgtattacaaaaagtagcagaagaagcagcacgagttctagtagatcctgttccaagctacaaacaagtcaaacagcttaaatatgtcggcatggtcttaaacgaagcgctgcgcttatggccaactgctcctgcgttttccctatatgcaaaagaagatacggtgcttggaggagaatatcctttaaccaaaggcgacgaagtaatggttctgattcctcagcttcaccgtgataaaacaatttggggagacgatgtggaggagttccgtccagagcgttttgaaaatccaagtgcgattccgcagcatgcgtttaaaccgtttggaaacggtcagcgtgcgtgtatcggtcagcagttcgctcttcatgaagcaacgctggtacttggtatgatgctaaaacactttgactttgaagatcatacaaactacgagctcgttattaaagaaaagttaacgttaaaacctgaaggctttgtggtaaaagcaaaatcgaaaggcattccgcttggccttattccttcacctagcactgaacagtctgctaaaaaagtacgcaaaaaggcagaaaacgctcataatacgccgctgcttgtgctatacggttcaaatgcgggaacagctgaaggaacggcgcgtgatttagcagatattgcaatgagcaaaggatttgcaccgcaggtcgcaacgcttgattcacacgccggaaatcttccgcgcgaaggagctgtattaattgtaacggcgtcttataacggtcatccgcctgataacgcaaagcaatttgtcgactggttagaccaagcgtctgctgatgaagtaaaaggcgttcgctactccgtatttggatgcggcgataaaaactgggctgcgacgtatcaaaaagtgcctgcttttatcgatgaaacgcttgccgctaaaggggcagaaaacatcgctgaccgcggtgaagcagatgcaagcgacgactttgaaggcacatatgaagaatggagtgatcatatgtggagtgacgtagcagcctactttaacctcgacattgaaaacagtgaagataataaatctactctttcacttcaatttgtcgacagcgccgcggatatgccgcttgcgaaaatgcacggtgcgttttcaacgaacgtcgtagcaagcaaagaacttcaacagccaggcagtgcacgaagcacgcgacatcttgaaattgaacttccaaaagaagcttcttatcaagaaggagatcatttaggtgttattcctcgcaactatgaaggaatagtaaaccgtgtaacagcaaggttcggcctaagcgcatcacagcaaatccgtctggaagcagaagaagaaaaattagctcatttgccactcgctaaaacagtatccgtagaagagcttctgcaatacgtggagcttcaagatcctgttacgcgcacgcagcttcgcgcaatggctgctaaaacggtctgcccgccgcataaagtagagcttgaagccttgcttgaaaagcaagcctacaaagaacaagtgctggcaaaacgtttaacaatgcttgaactgcttgaaaaatacccggcgtgtgaaatgaaattcagcgaatttatcgcccttctgccaagcatacgcccgcgctattactcgatttcttcatcacctcgtgtcgatgaaaaacaagcaagcatcacggtcagcgttgtctcaggaccggcgtggagcggatatggagaatataaaggaattgcgtcgaactatcttgccgagctgcaagaaggagatacgattacgtgctttatttccacaccgcagtcagaatttacgctgccaaaagaccctgaaacgccgcttatcatggtcggaccgggaacaggcgtcgcgccgtttagaggctttgtgcaggcgcgcaaacagctaaaagaacaaggacagtcacttggagaagcacatttatacttcggctgccgttcacctcatgaagactatctgtatcaagaagagcttgaaaacgcccaaagcgaaggcatcattacgcttcataccgctttttctcgcatgccaaatcagccgaaaacatacgttcagcacgtaatggaacaagacggcaagaaattgattgaacttcttgatcaaggagcgcacttctatatttgcggagacggaagccaaatggcacctgccgttgaagcaacgcttatgaaaagctatgctgacgttcaccaagtgagtgaagcagacgctcgcttatggctgcagcagctagaagaaaaaggccgatacgcaaaagacgtgtgggctggg

SEQ ID NO: 180 - protein, 1049 aa, synthetic construct
  REGION 1..1049: note = Variant of cytochrome P450
MTIKEMPQPKTFGELKNLPLLNTDKPVQALMRIADELGEIFKFEAPGSVTRFLSSQRLIKEACDESRFDKNLSQGLKFARDFLGDGLFTSWTHEPNWKKAHNILGPSFSQRAMKRYHAMMVDIAVQLVQKWERLNADEHIEVSEDMTRLTLDTIGLCGFNYRFNSFYRDQPHPFIVSVVRALDEVMNKLQRANPDDPAYDENKRQCQEDIKVMNDYVDKIIADRKARGEQSHDLLTQMLNGKDPETGEPLDDGNIRYQIITFLIAGHETTSGLLSFALYFLVKNPHVLQKVAEEAARVLVDPVPSYKQVKQLKYVGMVLNEALRLWPTAPAFSLYAKEDTVLGGEYPLTKGDEVMVLIPQLHRDKTIWGDDVEEFRPERFENPSAIPQHAFKPFGNGQRACIGQQFALHEATLVLGMMLKHFDFEDHTNYELVIKEKLTLKPEGFVVKAKSKGIPLGLIPSPSTEQSAKKVRKKAENAHNTPLLVLYGSNAGTAEGTARDLADIAMSKGFAPQVATLDSHAGNLPREGAVLIVTASYNGHPPDNAKQFVDWLDQASADEVKGVRYSVFGCGDKNWAATYQKVPAFIDETLAAKGAENIADRGEADASDDFEGTYEEWSDHMWSDVAAYFNLDIENSEDNKSTLSLQFVDSAADMPLAKMHGAFSTNVVASKELQQPGSARSTRHLEIELPKEASYQEGDHLGVIPRNYEGIVNRVTARFGLSASQQIRLEAEEEKLAHLPLAKTVSVEELLQYVELQDPVTRTQLRAMAAKTVCPPHKVELEALLEKQAYKEQVLAKRLTMLELLEKYPACEMKFSEFIALLPSIRPRYYSISSSPRVDEKQASITVSVVSGPAWSGYGEYKGIASNYLAELQEGDTITCFISTPQSEFTLPKDPETPLIMVGPGTGVAPFRGFVQARKQLKEQGQSLGEAHLYFGCRSPHEDYLYQEELENAQSEGIITLHTAFSRMPNQPKTYVQHVMEQDGKKLIELLDQGAHFYICGDGSQMAPAVEATLMKSYADVHQVSEADARLWLQQLEEKGRYAKDVWAG

SEQ ID NO: 181 - DNA, 3147 bp, synthetic construct
  misc_feature 1..3147: note = Variant of cytochrome P450
  source 1..3147: mol_type = other DNA
atgacaattaaggaaatgcctcagcctaagacgtttggagaacttaaaaatttaccgttattaaacacagataaaccggttcaagctttgatgcgtattgcggatgaattaggagaaatctttaaattcgaggcgcctggtagcgtaacgcgctttttatcaagtcagcgtctaattaaagaagcatgcgatgaatcacgctttgataaaaacttaagtcaaggccttaaatttgcacgtgattttcttggagacgggttatttacaagctggacgcatgaaccgaattggaaaaaagcgcataatatcttaggcccaagctttagtcagcgtgcaatgaaacgttatcatgcgatgatggtcgatatcgccgtgcagcttgttcaaaagtgggagcgtctaaatgcagatgagcatattgaagtatcggaagacatgacacgtttaacgctggatacaattggtctttgcggcttcaactatcgctttaacagcttttaccgagatcagcctcatccatttattgtgagtgttgtgcgtgcactggatgaagtaatgaacaagctgcagcgagcaaatccagacgacccagcttatgatgaaaacaagcgccagtgtcaagaagatatcaaggtgatgaacgactatgtcgataaaattattgcagatcgcaaagcaaggggtgaacaaagccatgatttattaacgcagatgctaaacggaaaagatccagaaacgggtgagccgcttgatgacgggaacattcgttatcaaattattacattcttaattgcgggacacgaaacaacaagtggtcttttatcatttgcgctgtatttcttagtgaaaaatccacatgtattacaaaaagtagcagaagaagcagcacgagttctagtagatcctgttccaagctacaaacaagtcaaacagcttaaatatgtcggcatggtcttaaacgaagcgctgcgcttatggccaactgctcctgcgttttccctatatgcaaaagaagatacggtgcttggaggagaatatcctttaaccaaaggcgacgaagtaatggttctgattcctcagcttcaccgtgataaaacaatttggggagacgatgtggaggagttccgtccagagcgttttgaaaatccaagtgcgattccgcagcatgcgtttaaaccgtttggaaacggtcagcgtgcgtgtatcggtcagcagttcgctcttcatgaagcaacgctggtacttggtatgatgctaaaacactttgactttgaagatcatacaaactacgagctcgttattaaagaaaagttaacgttaaaacctgaaggctttgtggtaaaagcaaaatcgaaaggcattccgcttggcggtattccttcacctagcactgaacagtctgctaaaaaagtacgcaaaaaggcagaaaacgctcataatacgccgctgcttgtgctatacggttcaaatgcgggaacagctgaaggaacggcgcgtgatttagcagatattgcaatgagcaaaggatttgcaccgcaggtcgcaacgcttgattcacacgccggaaatcttccgcgcgaaggagctgtattaattgtaacggcgtcttataacggtcatccgcctgataacgcaaagcaatttgtcgactggttagaccaagcgtctgctgatgaagtaaaaggcgttcgctactccgtatttggatgcggcgataaaaactgggctgcgacgtatcaaaaagtgcctgcttttatcgatgaaacgcttgccgctaaaggggcagaaaacatcgctgaccgcggtgaagcagatgcaagcgacgactttgaaggcacatatgaagaatggagtgatcatatgtggagtgacgtagcagcctactttaacctcgacattgaaaacagtgaagataataaatctactctttcacttcaatttgtcgacagcgccgcggatatgaagcttgcgaaaatgcacggtgcgttttcaacgaacgtcgtagcaagcaaagaacttcaacagccaggcagtgcacgaagcacgcgacatcttgaaattgaacttccaaaagaagcttcttatcaagaaggagatcatttaggtgttattcctcgcaactatgaaggaatagtaaaccgtgtaacagcaaggttcggcctaagcgcatcacagcaaatccgtctggaagcagaagaagaaaaattagctcatttgccactcgctaaaacagtatccgtagaagagcttctgcaatacgtggagcttcaagatcctgttacgcgcacgcagcttcgcgcaatggctgctaaaacggtctgcccgccgcataaagtagagcttgaagccttgcttgaaaagcaagcctacaaagaacaagtgctggcaaaacgtttaacaatgcttgaactgcttgaaaaatacccggcgtgtgaaatgaaattcagcgaatttatcgcccttctgccaagcatacgcccgcgctattactcgatttcttcatcacctcgtgtcgatgaaaaacaagcaagcatcacggtcagcgttgtctcaggaccggcgtggagcggatatggagaatataaaggaattgcgtcgaactatcttgccgagctgcaagaaggagatacgattacgtgctttatttccacaccgcagtcagaatttacgctgccaaaagaccctgaaacgccgcttatcatggtcggaccgggaacaggcgtcgcgccgtttagaggctttgtgcaggcgcgcaaacagctaaaagaacaaggacagtcacttggagaagcacatttatacttcggctgccgttcacctcatgaagactatctgtatcaagaagagcttgaaaacgcccaaagcgaaggcatcattacgcttcataccgctttttctcgcatgccaaatcagccgaaaacatacgttcagcacgtaatggaacaagacggcaagaaattgattgaacttcttgatcaaggagcgcacttctatatttgcggagacggaagccaaatggcacctgccgttgaagcaacgcttatgaaaagctatgctgacgttcaccaagtgagtgaagcagacgctcgcttatggctgcagcagctagaagaaaaaggccgatacgcaaaagacgtgtgggctggg

SEQ ID NO: 182 - protein, 1049 aa, synthetic construct
  REGION 1..1049: note = Variant of cytochrome P450
MTIKEMPQPKTFGELKNLPLLNTDKPVQALMRIADELGEIFKFEAPGSVTRFLSSQRLIKEACDESRFDKNLSQGLKFARDFLGDGLFTSWTHEPNWKKAHNILGPSFSQRAMKRYHAMMVDIAVQLVQKWERLNADEHIEVSEDMTRLTLDTIGLCGFNYRFNSFYRDQPHPFIVSVVRALDEVMNKLQRANPDDPAYDENKRQCQEDIKVMNDYVDKIIADRKARGEQSHDLLTQMLNGKDPETGEPLDDGNIRYQIITFLIAGHETTSGLLSFALYFLVKNPHVLQKVAEEAARVLVDPVPSYKQVKQLKYVGMVLNEALRLWPTAPAFSLYAKEDTVLGGEYPLTKGDEVMVLIPQLHRDKTIWGDDVEEFRPERFENPSAIPQHAFKPFGNGQRACIGQQFALHEATLVLGMMLKHFDFEDHTNYELVIKEKLTLKPEGFVVKAKSKGIPLGGIPSPSTEQSAKKVRKKAENAHNTPLLVLYGSNAGTAEGTARDLADIAMSKGFAPQVATLDSHAGNLPREGAVLIVTASYNGHPPDNAKQFVDWLDQASADEVKGVRYSVFGCGDKNWAATYQKVPAFIDETLAAKGAENIADRGEADASDDFEGTYEEWSDHMWSDVAAYFNLDIENSEDNKSTLSLQFVDSAADMKLAKMHGAFSTNVVASKELQQPGSARSTRHLEIELPKEASYQEGDHLGVIPRNYEGIVNRVTARFGLSASQQIRLEAEEEKLAHLPLAKTVSVEELLQYVELQDPVTRTQLRAMAAKTVCPPHKVELEALLEKQAYKEQVLAKRLTMLELLEKYPACEMKFSEFIALLPSIRPRYYSISSSPRVDEKQASITVSVVSGPAWSGYGEYKGIASNYLAELQEGDTITCFISTPQSEFTLPKDPETPLIMVGPGTGVAPFRGFVQARKQLKEQGQSLGEAHLYFGCRSPHEDYLYQEELENAQSEGIITLHTAFSRMPNQPKTYVQHVMEQDGKKLIELLDQGAHFYICGDGSQMAPAVEATLMKSYADVHQVSEADARLWLQQLEEKGRYAKDVWAG

SEQ ID NO: 183 - DNA, 3147 bp, synthetic construct
  misc_feature 1..3147: note = Variant of cytochrome P450
  source 1..3147: mol_type = other DNA
atgacaattaaggaaatgcctcagcctaagacgtttggagaacttaaaaatttaccgttattaaacacagataaaccggttcaagctttgatgcgtattgcggatgaattaggagaaatctttaaattcgaggcgcctggtagcgtaacgcgctttttatcaagtcagcgtctaattaaagaagcatgcgatgaatcacgctttgataaaaacttaagtcaaggccttaaatttgcacgtgattttcttggagacgggttatttacaagctggacgcatgaaccgaattggaaaaaagcgcataatatcttaggcccaagctttagtcagcgtgcaatgaaacgttatcatgcgatgatggtcgatatcgccgtgcagcttgttcaaaagtgggagcgtctaaatgcagatgagcatattgaagtatcggaagacatgacacgtttaacgctggatacaattggtctttgcggcttcaactatcgctttaacagcttttaccgagatcagcctcatccatttattgtgagtgttgtgcgtgcactggatgaagtaatgaacaagctgcagcgagcaaatccagacgacccagcttatgatgaaaacaagcgccagtgtcaagaagatatcaaggtgatgaacgactatgtcgataaaattattgcagatcgcaaagcaaggggtgaacaaagccatgatttattaacgcagatgctaaacggaaaagatccagaaacgggtgagccgcttgatgacgggaacattcgttatcaaattattacattcttaattgcgggacacgaaacaacaagtggtcttttatcatttgcgctgtatttcttagtgaaaaatccacatgtattacaaaaagtagcagaagaagcagcacgagttctagtagatcctgttccaagctacaaacaagtcaaacagcttaaatatgtcggcatggtcttaaacgaagcgctgcgcttatggccaactgctcctgcgttttccctatatgcaaaagaagatacggtgcttggaggagaatatcctttaaccaaaggcgacgaagtaatggttctgattcctcagcttcaccgtgataaaacaatttggggagacgatgtggaggagttccgtccagagcgttttgaaaatccaagtgcgattccgcagcatgcgtttaaaccgtttggaaacggtcagcgtgcgtgtatcggtcagcagttcgctcttcatgaagcaacgctggtacttggtatgatgctaaaacactttgactttgaagatcatacaaactacgagctcgttattaaagaaaagttaacgttaaaacctgaaggctttgtggtaaaagcaaaatcgaaaggcattccgcttggcggtattccttcacctagcactgaacagtctgctaaaaaagtacgcaaaaaggcagaaaacgctcataatacgccgctgcttgtgctatacggttcaaatgcgggaacagctgaaggaacggcgcgtgatttagcagatattgcaatgagcaaaggatttgcaccgcaggtcgcaacgcttgattcacacgccggaaatcttccgcgcgaaggagctgtattaattgtaacggcgtcttataacggtcatccgcctgataacgcaaagcaatttgtcgactggttagaccaagcgtctgctgatgaagtaaaaggcgttcgctactccgtatttggatgcggcgataaaaactgggctgcgacgtatcaaaaagtgcctgcttttatcgatgaaacgcttgccgctaaaggggcagaaaacatcgctgaccgcggtgaagcagatgcaagcgacgactttgaaggcacatatgaagaatggagtgatcatatgtggagtgacgtagcagcctactttaacctcgacattgaaaacagtgaagataataaatctactctttcacttcaatttgtcgacagcgccgcggatatgccgcttgcgaaaatgcacggtgcgttttcaacgaacgtcgtagcaagcaaagaacttcaacagccaggcagtgcacgaagcacgcgacatcttgaaattgaacttccaaaagaagcttcttatcaagaaggagatcatttaggtgttattcctcgcaactatgaaggaatagtaaaccgtgtaacagcaaggttcggcctaagcgcatcacagcaaatccgtctggaagcagaagaagaaaaattagctcatttgccactcgctaaaacagtatccgtagaagagcttctgcaatacgtggagcttcaagatcctgttacgcgcacgcagcttcgcgcaatggctgctaaaacggtctgcccgccgcataaagtagagcttgaagccttgcttgaaaagcaagcctacaaagaacaagtgctggcaaaacgtttaacaatgcttgaactgcttgaaaaatacccggcgtgtgaaatgaaattcagcgaatttatcgcccttctgccaagcatacgcccgcgctattactcgatttcttcatcacctcgtgtcgatgaaaaacaagcaagcatcacggtcagcgttgtctcaggaccggcgtggagcggatatggagaatataaaggaattgcgtcgaactatcttgccgagctgcaagaaggagatacgattacgtgctttatttccacaccgcagtcagaatttacgctgccaaaagaccctgaaacgccgcttatcatggtcggaccgggaacaggcgtcgcgccgtttagaggctttgtgcaggcgcgcaaacagctaaaagaacaaggacagtcacttggagaagcacatttatacttcggctgccgttcacctcatgaagactatctgtatcaagaagagcttgaaaacgcccaaagcgaaggcatcattacgcttcataccgctttttctcgcatgccaaatcagccgaaaacatacgttcagcacgtaatggaacaagacggcaagaaattgattgaacttcttgatcaaaatgcgcacttctatatttgcggagacggaagccaaatggcacctgccgttgaagcaacgcttatgaaaagctatgctgacgttcaccaagtgagtgaagcagacgctcgcttatggctgcagcagctagaagaaaaaggccgatacgcaaaagacgtgtgggctggg

SEQ ID NO: 184 - protein, 1049 aa, synthetic construct
  REGION 1..1049: note = Variant of cytochrome P450
MTIKEMPQPKTFGELKNLPLLNTDKPVQALMRIADELGEIFKFEAPGSVTRFLSSQRLIKEACDESRFDKNLSQGLKFARDFLGDGLFTSWTHEPNWKKAHNILGPSFSQRAMKRYHAMMVDIAVQLVQKWERLNADEHIEVSEDMTRLTLDTIGLCGFNYRFNSFYRDQPHPFIVSVVRALDEVMNKLQRANPDDPAYDENKRQCQEDIKVMNDYVDKIIADRKARGEQSHDLLTQMLNGKDPETGEPLDDGNIRYQIITFLIAGHETTSGLLSFALYFLVKNPHVLQKVAEEAARVLVDPVPSYKQVKQLKYVGMVLNEALRLWPTAPAFSLYAKEDTVLGGEYPLTKGDEVMVLIPQLHRDKTIWGDDVEEFRPERFENPSAIPQHAFKPFGNGQRACIGQQFALHEATLVLGMMLKHFDFEDHTNYELVIKEKLTLKPEGFVVKAKSKGIPLGGIPSPSTEQSAKKVRKKAENAHNTPLLVLYGSNAGTAEGTARDLADIAMSKGFAPQVATLDSHAGNLPREGAVLIVTASYNGHPPDNAKQFVDWLDQASADEVKGVRYSVFGCGDKNWAATYQKVPAFIDETLAAKGAENIADRGEADASDDFEGTYEEWSDHMWSDVAAYFNLDIENSEDNKSTLSLQFVDSAADMPLAKMHGAFSTNVVASKELQQPGSARSTRHLEIELPKEASYQEGDHLGVIPRNYEGIVNRVTARFGLSASQQIRLEAEEEKLAHLPLAKTVSVEELLQYVELQDPVTRTQLRAMAAKTVCPPHKVELEALLEKQAYKEQVLAKRLTMLELLEKYPACEMKFSEFIALLPSIRPRYYSISSSPRVDEKQASITVSVVSGPAWSGYGEYKGIASNYLAELQEGDTITCFISTPQSEFTLPKDPETPLIMVGPGTGVAPFRGFVQARKQLKEQGQSLGEAHLYFGCRSPHEDYLYQEELENAQSEGIITLHTAFSRMPNQPKTYVQHVMEQDGKKLIELLDQNAHFYICGDGSQMAPAVEATLMKSYADVHQVSEADARLWLQQLEEKGRYAKDVWAG

SEQ ID NO: 185 - DNA, 3147 bp, synthetic construct
  misc_feature 1..3147: note = Variant of cytochrome P450
  source 1..3147: mol_type = other DNA
atgacaattaaggaaatgcctcagcctaagacgtttggagaacttaaaaatttaccgttattaaacacagataaaccggttcaagctttgatgcgtattgcggatgaattaggagaaatctttaaattcgaggcgcctggtagcgtaacgcgctttttatcaagtcagcgtctaattaaagaagcatgcgatgaatcacgctttgataaaaacttaagtcaaggccttaaatttgcacgtgattttcttggagacgggttatttacaagctggacgcatgaaccgaattggaaaaaagcgcataatatcttaggcccaagctttagtcagcgtgcaatgaaacgttatcatgcgatgatggtcgatatcgccgtgcagcttgttcaaaagtgggagcgtctaaatgcagatgagcatattgaagtatcggaagacatgacacgtttaacgctggatacaattggtctttgcggcttcaactatcgctttaacagcttttaccgagatcagcctcatccatttattgtgagtgttgtgcgtgcactggatgaagtaatgaacaagctgcagcgagcaaatccagacgacccagcttatgatgaaaacaagcgccagtgtcaagaagatatcaaggtgatgaacgactatgtcgataaaattattgcagatcgcaaagcaaggggtgaacaaagccatgatttattaacgcagatgctaaacggaaaagatccagaaacgggtgagccgcttgatgacgggaacattcgttatcaaattattacattcttaattgcgggacacgaaacaacaagtggtcttttatcatttgcgctgtatttcttagtgaaaaatccacatgtattacaaaaagtagcagaagaagcagcacgagttctagtagatcctgttccaagctacaaacaagtcaaacagcttaaatatgtcggcatggtcttaaacgaagcgctgcgcttatggccaactgctcctgcgttttccctatatgcaaaagaagatacggtgcttggaggagaatatcctttaaccaaaggcgacgaagtaatggttctgattcctcagcttcaccgtgataaaacaatttggggagacgatgtggaggagttccgtccagagcgttttgaaaatccaagtgcgattccgcagcatgcgtttaaaccgtttggaaacggtcagcgtgcgtgtatcggtcagcagttcgctcttcatgaagcaacgctggtacttggtatgatgctaaaacactttgactttgaagatcatacaaactacgagctcgttattaaagaaaagttaacgttaaaacctgaaggctttgtggtaaaagcaaaatcgaaaggcattccgcttggccctattccttcacctagcactgaacagtctgctaaaaaagtacgcaaaaaggcagaaaacgctcataatacgccgctgcttgtgctatacggttcaaatgcgggaacagctgaaggaacggcgcgtgatttagcagatattgcaatgagcaaaggatttgcaccgcaggtcgcaacgcttgattcacacgccggaaatcttccgcgcgaaggagctgtattaattgtaacggcgtcttataacggtcatccgcctgataacgcaaagcaatttgtcgactggttagaccaagcgtctgctgatgaagtaaaaggcgttcgctactccgtatttggatgcggcgataaaaactgggctgcgacgtatcaaaaagtgcctgcttttatcgatgaaacgcttgccgctaaaggggcagaaaacatcgctgaccgcggtgaagcagatgcaagcgacgactttgaaggcacatatgaagaatggcgtgatcatatgtggagtgacgtagcagcctactttaacctcgacattgaaaacagtgaagataataaatctactctttcacttcaatttgtcgacagcgccgcggatatgccgcttgcgaaaatgcacggtgcgttttcaacgaacgtcgtagcaagcaaagaacttcaacagccaggcagtgcacgaagcacgcgacatcttgaaattgaacttccaaaagaagcttcttatcaagaaggagatcatttaggtgttattcctcgcaactatgaaggaatagtaaaccgtgtaacagcaaggttcggcctaagcgcatcacagcaaatccgtctggaagcagaagaagaaaaattagctcatttgccactcgctaaaacagtatccgtagaagagcttctgcaatacgtggagcttcaagatcctgttacgcgcacgcagcttcgcgcaatggctgctaaaacggtctgcccgccgcataaagtagagcttgaagccttgcttgaaaagcaagcctacaaagaacaagtgctggcaaaacgtttaacaatgcttgaactgcttgaaaaatacccggcgtgtgaaatgaaattcagcgaatttatcgcccttctgccaagcatacgcccgcgctattactcgatttcttcatcacctcgtgtcgatgaaaaacaagcaagcatcacggtcagcgttgtctcaggaccggcgtggagcggatatggagaatataaaggaattgcgtcgaactatcttgccgagctgcaagaaggagatacgattacgtgctttatttccacaccgcagtcagaatttacgctgccaaaagaccctgaaacgccgcttatcatggtcggaccgggaacaggcgtcgcgccgtttagaggctttgtgcaggcgcgcaaacagctaaaagaacaaggacagtcacttggagaagcacatttatacttcggctgccgttcacctcatgaagactatctgtatcaagaagagcttgaaaacgcccaaagcgaaggcatcattacgcttcataccgctttttctcgcatgccaaatcagccgaaaacatacgttcagcacgtaatggaacaagacggcaagaaattgattgaacttcttgatcaaggagcgcacttctatatttgcggagacggaagccaaatggcacctgccgttgaagcaacgcttatgaaaagctatgctgacgttcaccaagtgagtgaagcagacgctcgcttatggctgcagcagctagaagaaaaaggccgatacgcaaaagacgtgtgggctggg

SEQ ID NO: 186 - protein, 1049 aa, synthetic construct
  REGION 1..1049: note = Variant of cytochrome P450
MTIKEMPQPKTFGELKNLPLLNTDKPVQALMRIADELGEIFKFEAPGSVTRFLSSQRLIKEACDESRFDKNLSQGLKFARDFLGDGLFTSWTHEPNWKKAHNILGPSFSQRAMKRYHAMMVDIAVQLVQKWERLNADEHIEVSEDMTRLTLDTIGLCGFNYRFNSFYRDQPHPFIVSVVRALDEVMNKLQRANPDDPAYDENKRQCQEDIKVMNDYVDKIIADRKARGEQSHDLLTQMLNGKDPETGEPLDDGNIRYQIITFLIAGHETTSGLLSFALYFLVKNPHVLQKVAEEAARVLVDPVPSYKQVKQLKYVGMVLNEALRLWPTAPAFSLYAKEDTVLGGEYPLTKGDEVMVLIPQLHRDKTIWGDDVEEFRPERFENPSAIPQHAFKPFGNGQRACIGQQFALHEATLVLGMMLKHFDFEDHTNYELVIKEKLTLKPEGFVVKAKSKGIPLGPIPSPSTEQSAKKVRKKAENAHNTPLLVLYGSNAGTAEGTARDLADIAMSKGFAPQVATLDSHAGNLPREGAVLIVTASYNGHPPDNAKQFVDWLDQASADEVKGVRYSVFGCGDKNWAATYQKVPAFIDETLAAKGAENIADRGEADASDDFEGTYEEWRDHMWSDVAAYFNLDIENSEDNKSTLSLQFVDSAADMPLAKMHGAFSTNVVASKELQQPGSARSTRHLEIELPKEASYQEGDHLGVIPRNYEGIVNRVTARFGLSASQQIRLEAEEEKLAHLPLAKTVSVEELLQYVELQDPVTRTQLRAMAAKTVCPPHKVELEALLEKQAYKEQVLAKRLTMLELLEKYPACEMKFSEFIALLPSIRPRYYSISSSPRVDEKQASITVSVVSGPAWSGYGEYKGIASNYLAELQEGDTITCFISTPQSEFTLPKDPETPLIMVGPGTGVAPFRGFVQARKQLKEQGQSLGEAHLYFGCRSPHEDYLYQEELENAQSEGIITLHTAFSRMPNQPKTYVQHVMEQDGKKLIELLDQGAHFYICGDGSQMAPAVEATLMKSYADVHQVSEADARLWLQQLEEKGRYAKDVWAG

SEQ ID NO: 187 - DNA, 3147 bp, synthetic construct
  misc_feature 1..3147: note = Variant of cytochrome P450
  source 1..3147: mol_type = other DNA
atgacaattaaggaaatgcctcagcctaagacgtttggagaacttaaaaatttaccgttattaaacacagataaaccggttcaagctttgatgcgtattgcggatgaattaggagaaatctttaaattcgaggcgcctggtagcgtaacgcgctttttatcaagtcagcgtctaattaaagaagcatgcgatgaatcacgctttgataaaaacttaagtcaaggccttaaatttgcacgtgattttcttggagacgggttatttacaagctggacgcatgaaccgaattggaaaaaagcgcataatatcttaggcccaagctttagtcagcgtgcaatgaaacgttatcatgcgatgatggtcgatatcgccgtgcagcttgttcaaaagtgggagcgtctaaatgcagatgagcatattgaagtatcggaagacatgacacgtttaacgctggatacaattggtctttgcggcttcaactatcgctttaacagcttttaccgagatcagcctcatccatttattgtgagtgttgtgcgtgcactggatgaagtaatgaacaagctgcagcgagcaaatccagacgacccagcttatgatgaaaacaagcgccagtgtcaagaagatatcaaggtgatgaacgactatgtcgataaaattattgcagatcgcaaagcaaggggtgaacaaagccatgatttattaacgcagatgctaaacggaaaagatccagaaacgggtgagccgcttgatgacgggaacattcgttatcaaattattacattcttaattgcgggacacgaaacaacaagtggtcttttatcatttgcgctgtatttcttagtgaaaaatccacatgtattacaaaaagtagcagaagaagcagcacgagttctagtagatcctgttccaagctacaaacaagtcaaacagcttaaatatgtcggcatggtcttaaacgaagcgctgcgcttatggccaactgctcctgcgttttccctatatgcaaaagaagatacggtgcttggaggagaatatcctttaaccaaaggcgacgaagtaatggttctgattcctcagcttcaccgtgataaaacaatttggggagacgatgtggaggagttccgtccagagcgttttgaaaatccaagtgcgattccgcagcatgcgtttaaaccgtttggaaacggtcagcgtgcgtgtatcggtcagcagttcgctcttcatgaagcaacgctggtacttggtatgatgctaaaacactttgactttgaagatcatacaaactacgagctcgttattaaagaaaagttaacgttaaaacctgaaggctttgtggtaaaagcaaaatcgaaaggcattccgcttggcggtattccttcacctagcactgaacagtctgctaaaaaagtacgcaaaaaggcagaaaacgctcataatacgccgctgcttgtgctatacggttcaaatgcgggaacagctgaaggaacggcgcgtgatttagcagatattgcaatgagcaaaggatttagtccgcaggtcgcaacgcttgattcacacgccggaaatcttccgcgcgaaggagctgtattaattgtaacggcgtcttataacggtcatccgcctgataacgcaaagcaatttgtcgactggttagaccaagcgtctgctgatgaagtaaaaggcgttcgctactccgtatttggatgcggcgataaaaactgggctgcgacgtatcaaaaagtgcctgcttttatcgatgaaacgcttgccgctaaaggggcagaaaacatcgctgaccgcggtgaagcagatgcaagcgacgactttgaaggcacatatgaagaatggagtgatcatatgtggagtgacgtagcagcctactttaacctcgacattgaaaacagtgaagataataaatctactctttcacttcaatttgtcgacagcgccgcggatatgccgcttgcgaaaatgcacggtgcgttttcaacgaacgtcgtagcaagcaaagaacttcaacagccaggcagtgcacgaagcacgcgacatcttgaaattgaacttccaaaagaagcttcttatcaagaaggagatcatttaggtgttattcctcgcaactatgaaggaatagtaaaccgtgtaacagcaaggttcggcctaagcgcatcacagcaaatccgtctggaagcagaagaagaaaaattagctcatttgccactcgctaaaacagtatccgtagaagagcttctgcaatacgtggagcttcaagatcctgttacgcgcacgcagcttcgcgcaatggctgctaaaacggtctgcccgccgcataaagtagagcttgaagccttgcttgaaaagcaagcctacaaaggacaagtgctggcaaaacgtttaacaatgcttgaactgcttgaaaaatacccggcgtgtgaaatgaaattcagcgaatttatcgcccttctgccaagcatacgcccgcgctattactcgatttcttcatcacctcgtgtcgatgaaaaacaagcaagcatcacggtcagcgttgtctcaggaccggcgtggagcggatatggagaatataaaggaattgcgtcgaactatcttgccgagctgcaagaaggagatacgattacgtgctttatttccacaccgcagtcagaatttacgctgccaaaagaccctgaaacgccgcttatcatggtcggaccgggaacaggcgtcgcgccgtttagaggctttgtgcaggcgcgcaaacagctaaaagaacaaggacagtcacttggagaagcacatttatacttcggctgccgttcacctcatgaagactatctgtatcaagaagagcttgaaaacgcccaaagcgaaggcatcattacgcttcataccgctttttctcgcatgccaaatcagccgaaaacatacgttcagcacgtaatggaacaagacggcaagaaattgattgaacttcttgatcaaggagcgcacttctatatttgcggagacggaagccaaatggcacctgccgttgaagcaacgcttatgaaaagctatgctgacgttcaccaagtgagtgaagcagacgctcgcttatggctgcagcagctagaagaaaaaggccgatacgcaaaagacgtgtgggctggg

SEQ ID NO: 188 - protein, 1049 aa, synthetic construct
  REGION 1..1049: note = Variant of cytochrome P450
MTIKEMPQPKTFGELKNLPLLNTDKPVQALMRIADELGEIFKFEAPGSVTRFLSSQRLIKEACDESRFDKNLSQGLKFARDFLGDGLFTSWTHEPNWKKAHNILGPSFSQRAMKRYHAMMVDIAVQLVQKWERLNADEHIEVSEDMTRLTLDTIGLCGFNYRFNSFYRDQPHPFIVSVVRALDEVMNKLQRANPDDPAYDENKRQCQEDIKVMNDYVDKIIADRKARGEQSHDLLTQMLNGKDPETGEPLDDGNIRYQIITFLIAGHETTSGLLSFALYFLVKNPHVLQKVAEEAARVLVDPVPSYKQVKQLKYVGMVLNEALRLWPTAPAFSLYAKEDTVLGGEYPLTKGDEVMVLIPQLHRDKTIWGDDVEEFRPERFENPSAIPQHAFKPFGNGQRACIGQQFALHEATLVLGMMLKHFDFEDHTNYELVIKEKLTLKPEGFVVKAKSKGIPLGGIPSPSTEQSAKKVRKKAENAHNTPLLVLYGSNAGTAEGTARDLADIAMSKGFSPQVATLDSHAGNLPREGAVLIVTASYNGHPPDNAKQFVDWLDQASADEVKGVRYSVFGCGDKNWAATYQKVPAFIDETLAAKGAENIADRGEADASDDFEGTYEEWSDHMWSDVAAYFNLDIENSEDNKSTLSLQFVDSAADMPLAKMHGAFSTNVVASKELQQPGSARSTRHLEIELPKEASYQEGDHLGVIPRNYEGIVNRVTARFGLSASQQIRLEAEEEKLAHLPLAKTVSVEELLQYVELQDPVTRTQLRAMAAKTVCPPHKVELEALLEKQAYKGQVLAKRLTMLELLEKYPACEMKFSEFIALLPSIRPRYYSISSSPRVDEKQASITVSVVSGPAWSGYGEYKGIASNYLAELQEGDTITCFISTPQSEFTLPKDPETPLIMVGPGTGVAPFRGFVQARKQLKEQGQSLGEAHLYFGCRSPHEDYLYQEELENAQSEGIITLHTAFSRMPNQPKTYVQHVMEQDGKKLIELLDQGAHFYICGDGSQMAPAVEATLMKSYADVHQVSEADARLWLQQLEEKGRYAKDVWAG

SEQ ID NO: 189 - DNA, 3147 bp, synthetic construct
  misc_feature 1..3147: note = Variant of cytochrome P450
  source 1..3147: mol_type = other DNA
atgacaattaaggaaatgcctcagcctaagacgtttggagaacttaaaaatttaccgttattaaacacagataaaccggttcaagctttgatgcgtattgcggatgaattaggagaaatctttaaattcgaggcgcctggtagcgtaacgcgctttttatcaagtcagcgtctaattaaagaagcatgcgatgaacgtcgctttgataaaaacttaagtcaaggccttaaatttgcacgtgattttcttggagacgggttatttacaagctggacgcatgaaccgaattggaaaaaagcgcataatatcttaggcccaagctttagtcagcgtgcaatgaaacgttatcatgcgatgatggtcgatatcgccgtgcagcttgttcaaaagtgggagcgtctaaatgcagatgagcatattgaagtatcggaagacatgacacgtttaacgctggatacaattggtctttgcggcttcaactatcgctttaacagcttttaccgagatcagcctcatccatttattgtgagtgttgtgcgtgcactggatgaagtaatgaacaagctgcagcgagcaaatccagacgacccagcttatgatgaaaacaagcgccagtgtcaagaagatatcaaggtgatgaacgactatgtcgataaaattattgcagatcgcaaagcaaggggtgaacaaagccatgatttattaacgcagatgctaaacggaaaagatccagaaacgggtgagccgcttgatgacgggaacattcgttatcaaattattacattcttaattgcgggacacgaaacaacaagtggtcttttatcatttgcgctgtatttcttagtgaaaaatccacatgtattacaaaaagtagcagaagaagcagcacgagttctagtagatcctgttccaagctacaaacaagtcaaacagcttaaatatgtcggcatggtcttaaacgaagcgctgcgcttatggccaactgctcctgcgttttccctatatgcaaaagaagatacggtgcttggaggagaatatcctttaaccaaaggcgacgaagtaatggttctgattcctcagcttcaccgtgataaaacaatttggggagacgatgtggaggagttccgtccagagcgttttgaaaatccaagtgcgattccgcagcatgcgtttaaaccgtttggaaacggtcagcgtgcgtgtatcggtcagcagttcgctcttcatgaagcaacgctggtacttggtatgatgctaaaacactttgactttgaagatcatacaaactacgagctcgttattggcgaaaagttaacgttaaaacctgaaggctttgtggtaaaagcaaaatcgaaaggcattccgcttggcctgattccttcacctagcactgaacagtctgctaaaaaagtacgcaaaaaggcagaaaacgctcataatacgccgctgcttgtgctatacggttcaaatgcgggaacagctgaaggaacggcgcgtgatttagcagatattgcaatgagcaaaggatttgcaccgcaggtcgcaacgcttgattcacacgccggaaatcttccgcgcgaaggagctgtattaattgtaacggcgtcttataacggtcatccgcctgataacgcaaagcaatttgtcgactggttagatcaagcgtctgctgatgaagtaaaaggcgttcgctactccgtatttggatgcggcgataaaaactgggctgcgacgtatcaaaaagtgcctgcttttatcgatgaaacgcttgccgctaaaggggcagaaaacatcgctgaccgcggtgaagcagatgcaagcgacgactttgaaggcgcgtatgaagaatggagtgatcatatgtggagtgacgtagcagcctactttaacctcgacattgaaaacagtgaagataataaatctactctttcacttcaatttgtcgacagcgccgcggatatgccgcttgcgaaaatgcacggtgcgttttcaacgaacgtcgtagcaagcaaagaacttcaacagccaggcagtgcacgaagcacgcgacatcttgaaattgaacttccaaaagaagcttcttatcaagaaggagatcatttaggtgttattcctcgcaactatgaaggaatagtaaaccgtgtaacagcaaggttcggcctaagcgcatcacagcaaatccgtctggaagcagaagaagaaaaattagctcatttgccactcgctaaaacagtatccgtagaagagcttctgcaatacgtggagcttcaagatcctgttacgcgcacgcagcttcgcgcaatggcttcgaaaacggtctgcccgccgcataaagtagagcttgaagccttgcttgaaaagcaagcctacaaagaacaagtgctggcaaaacgtttaacaatgcttgaactgcttgaaaaatacccggcgtgtgaaatgaaattcagcgaatttatcgcccttctgccaagcatacgcccgcgctattactcgatttcttcatcacctcgtgtcgatgaaaaacaagcaagcatcacggtcagcgttgtctcaggaccggcgtggagcggatatggagaatataaaggaattgcgtcgaactatcttgccgagctgcaagaaggagatacgattacgtgctttatttccacacctcagtcagggtttacgctgccaaaagaccctgaaacgccgcttatcatggtcggaccgggaacaggcgtcgcgccgtttagaggctttgtgcaggcgcgcaaacagctaaaagaacaaggacagtcacttggacgcgcacatttatacttcggctgccgttcacctcatgaagactatctgtatcaagaagagcttgaaaacgcccaaagcgaaggcatcattacgcttcataccgctttttctcgcatgccaaatcagccgaaaacatacgttcagcacgtaatggaacaagacggcaagaaattgattgaacttcttgatcaaggagcgcacttctatatttgcggagacggaagccaaatggcacctgccgttgaagcaacgcttatgaaaagctatgctgacgttcaccaagtgagtgaagcagacgctcgcttatggctgcagcagctagaagaaaaaggccgatacgcaaaagacgtgtgggctggg

SEQ ID NO: 190 - protein, 1049 aa, synthetic construct
  REGION 1..1049: note = Variant of cytochrome P450
MTIKEMPQPKTFGELKNLPLLNTDKPVQALMRIADELGEIFKFEAPGSVTRFLSSQRLIKEACDERRFDKNLSQGLKFARDFLGDGLFTSWTHEPNWKKAHNILGPSFSQRAMKRYHAMMVDIAVQLVQKWERLNADEHIEVSEDMTRLTLDTIGLCGFNYRFNSFYRDQPHPFIVSVVRALDEVMNKLQRANPDDPAYDENKRQCQEDIKVMNDYVDKIIADRKARGEQSHDLLTQMLNGKDPETGEPLDDGNIRYQIITFLIAGHETTSGLLSFALYFLVKNPHVLQKVAEEAARVLVDPVPSYKQVKQLKYVGMVLNEALRLWPTAPAFSLYAKEDTVLGGEYPLTKGDEVMVLIPQLHRDKTIWGDDVEEFRPERFENPSAIPQHAFKPFGNGQRACIGQQFALHEATLVLGMMLKHFDFEDHTNYELVIGEKLTLKPEGFVVKAKSKGIPLGLIPSPSTEQSAKKVRKKAENAHNTPLLVLYGSNAGTAEGTARDLADIAMSKGFAPQVATLDSHAGNLPREGAVLIVTASYNGHPPDNAKQFVDWLDQASADEVKGVRYSVFGCGDKNWAATYQKVPAFIDETLAAKGAENIADRGEADASDDFEGAYEEWSDHMWSDVAAYFNLDIENSEDNKSTLSLQFVDSAADMPLAKMHGAFSTNVVASKELQQPGSARSTRHLEIELPKEASYQEGDHLGVIPRNYEGIVNRVTARFGLSASQQIRLEAEEEKLAHLPLAKTVSVEELLQYVELQDPVTRTQLRAMASKTVCPPHKVELEALLEKQAYKEQVLAKRLTMLELLEKYPACEMKFSEFIALLPSIRPRYYSISSSPRVDEKQASITVSVVSGPAWSGYGEYKGIASNYLAELQEGDTITCFISTPQSGFTLPKDPETPLIMVGPGTGVAPFRGFVQARKQLKEQGQSLGRAHLYFGCRSPHEDYLYQEELENAQSEGIITLHTAFSRMPNQPKTYVQHVMEQDGKKLIELLDQGAHFYICGDGSQMAPAVEATLMKSYADVHQVSEADARLWLQQLEEKGRYAKDVWAG

SEQ ID NO: 191 - DNA, 3147 bp, synthetic construct
  misc_feature 1..3147: note = Variant of cytochrome P450
  source 1..3147: mol_type = other DNA
atgacaattaaggaaatgcctcagcctaagacgtttggagaacttaaaaatttaccgttattaaacacagataaaccggttcaagctttgatgcgtattgcggatgaattaggagaaatctttaaattcgaggcgcctggtagcgtaacgcgctttttatcaagtcagcgtctaattaaagaagcatgcgatgaaagtcgctttgataaaaacttaagtcaaggccttaaatttgcacgtgattttcttggagacgggttatttacaagctggacgcatgaaccgaattggaaaaaagcgcataatatcttaggcccaagctttagtcagcgtgcaatgaaacgttatcatgcgatgatggtcgatatcgccgtgcagcttgttcaaaagtgggagcgtctaaatgcagatgagcatattgaagtatcggaagacatgacacgtttaacgctggatacaattggtctttgcggcttcaactatcgctttaacagcttttaccgagatcagcctcatccatttattgtgagtgttgtgcgtgcactggatgaagtaatgaacaagctgcagcgagcaaatccagacgacccagcttatgatgaaaacaagcgccagtgtcaagaagctatcaaggtgatgaacgactatgtcgataaaattattgcagatcgcaaagcaaggggtgaacaaagccatgatttattaacgcagatgctaaacggaaaagatccagaaacgggtgagccgcttgatgacgggaacattcgttatcaaattattacattcttaattgcgggacacgaaacaacaagtggtcttttatcatttgcgctgtatttcttagtgaaaaatccacatgtattacaaaaagtagcagaagaagcagcacgagttctagtagatcctgttccaagctacaaacaagtcaaacagcttaaatatgtcggcatggtcttaaacgaagcgctgcgcttatggccaactgctcctgcgttttccctatatgcaaaagaagatacggtgcttggaggagaatatcctttaaccaaaggcgacgaagtaatggttctgattcctcagcttcaccgtgataaaacaatttggggagacgatgtggaggagttccgtccagagcgttttgaaaatccaagtgcgattccgcagcatgcgtttaaaccgtttggaaacggtcagcgtgcgtgtatcggtcagcagttcgctcttcatgaagcaacgctggtacttggtatgatgctaaaacactttgactttgaagatcatacaaactacgagctcgttattggcgaaaagttaacgttaaaacctgaaggctttgtggtaaaagcaaaatcgaaaggcatgccgcttggcctgattccttcacctagcactgaacagtctgctaaaaaagtacgcaaaaaggcagaaaacgctcataatacgccgctgcttgtgctatacggttcaaatgcgggaacagctgaaggaacggcgcgtgatttagcagatattgcaatgagcaaaggatttgcaccgcaggtcgcaacgcttgattcacacgccggaaatcttccgcgcgaaggagctgtattaattgtaacggcgtcttataacggtcatccgcctgataacgcaaagcaatttgtcgactggttagatcaagcgtctgctgatgaagtaaaaggcgttcgctactccgtatttggatgcggcgataaaaactgggctgcgacgtatcaaaaagtgcctgcttttatcgatgaaacgcttgccgctaaaggggcagaaaacatcgctgaccgcggtgaagcagatgcaagcgacgactttgaaggcgcgtatgaagaatggagtgatcatatgtggagtgacgtagcagcctactttaacctcgacattgaaaacagtgaagataataaatctactctttcacttcaatttgtcgacagcgccgcggatatgccgcttgcgaaaatgcacggtgcgttttcaacgaacgtcgtagcaagcaaagaacttcaacagccaggcagtgcacgaagcacgcgacatcttgaaattgaacttccaaaagaagcttcttatcaagaaggagatcatttaggtgttattcctcgcaactatgaaggaatagtaaaccgtgtaacagcaaggttcggcctaagcgcatcacagcaaatccgtctggaagcagaagaagaaaaattagctcatttgccactcgctaaaacagtatccgtagaagagcttctgcaatacgtggagcttcaagatcctgttacgcgcacgcagcttcgcgcaatggcttcgaaaacggtctgcccgccgcataaagtagagcttgaagccttgcttgaaaagcaagcctacaaagaacaagtgctggcaaaacgtttaacaatgcttgaactgcttgaaaaatacccggcgtgtgaaatgaaattcagcgaatttatcgcccttctgccaagcatacgcccgcgctattactcgatttcttcatcacctcgtgtcgatgaaaaacaagcaagcatcacggtcagcgttgtctcaggaccggcgtggagcggatatggagaatataaaggaattgcgtcgaactatcttgccgagctgcaagaaggagatacgattacgtgctttatttccacacctcagtcagagtttacgctgccaaaagaccctgaaacgccgcttatcatggtcggaccgggaacaggcgtcgcgccgtttagaggctttgtgcaggcgcgcaaacagctaaaagaacaaggacagtcacttggagaggcacatttatacttcggctgccgttcacctcatgaagactatctgtatcaagaagagcttgaaaacgcccaaagcgaaggcatcattacgcttcataccgctttttctcgcatgccaaatcagccgaaaacatacgttcagcacgtaatggaacaagacggcaagaaattgattgaacttcttgatcaaggagcgcacttctatatttgcggagacggaagccaaatggcacctgccgttgaagcaacgcttatgaaaagctatgctgacgttcaccaagtgagtgaagcagacgctcgcttatggctgcagcagctagaagaaaaaggccgatacgcaaaagacgtgtgggctggg

SEQ ID NO: 192 - protein, 1049 aa, synthetic construct
  REGION 1..1049: note = Variant of cytochrome P450
MTIKEMPQPKTFGELKNLPLLNTDKPVQALMRIADELGEIFKFEAPGSVTRFLSSQRLIKEACDESRFDKNLSQGLKFARDFLGDGLFTSWTHEPNWKKAHNILGPSFSQRAMKRYHAMMVDIAVQLVQKWERLNADEHIEVSEDMTRLTLDTIGLCGFNYRFNSFYRDQPHPFIVSVVRALDEVMNKLQRANPDDPAYDENKRQCQEAIKVMNDYVDKIIADRKARGEQSHDLLTQMLNGKDPETGEPLDDGNIRYQIITFLIAGHETTSGLLSFALYFLVKNPHVLQKVAEEAARVLVDPVPSYKQVKQLKYVGMVLNEALRLWPTAPAFSLYAKEDTVLGGEYPLTKGDEVMVLIPQLHRDKTIWGDDVEEFRPERFENPSAIPQHAFKPFGNGQRACIGQQFALHEATLVLGMMLKHFDFEDHTNYELVIGEKLTLKPEGFVVKAKSKGMPLGLIPSPSTEQSAKKVRKKAENAHNTPLLVLYGSNAGTAEGTARDLADIAMSKGFAPQVATLDSHAGNLPREGAVLIVTASYNGHPPDNAKQFVDWLDQASADEVKGVRYSVFGCGDKNWAATYQKVPAFIDETLAAKGAENIADRGEADASDDFEGAYEEWSDHMWSDVAAYFNLDIENSEDNKSTLSLQFVDSAADMPLAKMHGAFSTNVVASKELQQPGSARSTRHLEIELPKEASYQEGDHLGVIPRNYEGIVNRVTARFGLSASQQIRLEAEEEKLAHLPLAKTVSVEELLQYVELQDPVTRTQLRAMASKTVCPPHKVELEALLEKQAYKEQVLAKRLTMLELLEKYPACEMKFSEFIALLPSIRPRYYSISSSPRVDEKQASITVSVVSGPAWSGYGEYKGIASNYLAELQEGDTITCFISTPQSEFTLPKDPETPLIMVGPGTGVAPFRGFVQARKQLKEQGQSLGEAHLYFGCRSPHEDYLYQEELENAQSEGIITLHTAFSRMPNQPKTYVQHVMEQDGKKLIELLDQGAHFYICGDGSQMAPAVEATLMKSYADVHQVSEADARLWLQQLEEKGRYAKDVWAG

SEQ ID NO: 193 - DNA, 3147 bp, synthetic construct
  misc_feature 1..3147: note = Variant of cytochrome P450
  source 1..3147: mol_type = other DNA
atgacaattaaggaaatgcctcagcctaagacgtttggagaacttaaaaatttaccgttattaaacacagataaaccggttcaagctttgatgcgtattgcggatgaattaggagaaatctttaaattcgaggcgcctggtagcgtaacgcgctttttatcaagtcagcgtctaattaaagaagcatgcgatgaatcacgctttgataaaaacttaagtcaaggccttaaatttgcacgtgattttcttggagacgggttatttacaagctggacgcatgaaccgaattggaaaaaagcgcataatatcttaggcccaagctttagtcagcgtgcaatgaaacgttatcatgcgatgatggtcgatatcgccgtgcagcttgttcaaaagtgggagcgtctaaatgcagatgagcatattgaagtatcggaagacatgacacgtttaacgctggatacaattggtctttgcggcttcaactatcgctttaacagcttttaccgagatcagcctcatccatttattgtgagtgttgtgcgtgcactggatgaagtaatgaacaagctgcagcgagcaaatccagacgacccagcttatgatgaaaacaagcgccagtgtcaagaagctatcaaggtgatgaacgactatgtcgataaaattattgcagatcgcaaagcaaggggtgaacaaagccatgatttattaacgcagatgctaaacggaaaagatccagaaacgggtgagccgcttgatgacgggaacattcgttatcaaattattacattcttaattgcgggacacgaaacaacaagtggtcttttatcatttgcgctgtatttcttagtgaaaaatccacatgtattacaaaaagtagcagaagaagcagcacgagttctagtagatcctgttccaagctacaaacaagtcaaacagcttaaatatgtcggcatggtcttaaacgaagcgctgcgcttatggccaactgctcctgcgttttccctatatgcaaaagaagatacggtgcttggaggagaatatcctttaaccaaaggcgacgaagtaatggttctgattcctcagcttcaccgtgataaaacaatttggggagacgatgtggaggagttccgtccagagcgttttgaaaatccaagtgcgattccgcagcatgcgtttaaaccgtttggaaacggtcagcgtgcgtgtatcggtcagcagttcgctcttcatgaagcaacgctggtacttggtatgatgctaaaacactttgactttgaagatcatacaaactacgagctcgttattggcgaaaagttaacgttaaaacctgaaggctttgtggtaaaagcaaaatcgaaaggcattccgcttggcggtattccttcacctagcactgaacagtctgctaaaaaagtacgcaaaaaggcagaaaacgctcataatacgccgctgcttgtgctatacggttcaaatgcgggaacagctgaaggaacggcgcgtgatttagcagatattgcaatgagcaaaggatttgcaccgcaggtcgcaacgcttgattcacacgccggaaatcttccgcgcgaaggagctgtattaattgtaacggcgtcttataacggtcatccgcctgataacgcaaagcaatttgtcgactggttagatcaagcgtctgctgatgaagtaaaaggcgttcgctactccgtatttggatgcggcgataaaaactgggctgcgacgtatcaaaaagtgcctgcttttatcgatgaaacgcttgccgctaaaggggcagaaaacatcgctgaccgcggtgaagcagatgcaagcgacgactttgaaggcgcgtatgaagaatggagtgatcatatgtggagtgacgtagcagcctactttaacctcgacattgaaaacagtgaagataataaatctactctttcacttcaatttgtcgacagcgccgcggatatgccgcttgcgaaaatgcacggtgcgttttcaacgaacgtcgtagcaagcaaagaacttcaacagccaggcagtgcacgaagcacgcgacatcttgaaattgaacttccaaaagaagcttcttatcaagaaggagatcatttaggtgttattcctcgcaactatgaaggaatagtaaaccgtgtaacagcaaggttcggcctaagcgcatcacagcaaatccgtctggaagcagaagaagaaaaattagctcatttgccactcgctaaaacagtatccgtagaagagcttctgcaatacgtggagcttcaagatcctgttacgcgcacgcagcttcgcgcaatggctgctaaaacggtctgcccgccgcataaagtagagcttgaagccttgcttgaaaagcaagcctacaaagaacaagtgctggcaaaacgtttaacaatgcttgaactgcttgaaaaatacccggcgtgtgaaatgaaattcagcgaatttatcgcccttctgccaagcatacgcccgcgctattactcgatttcttcatcacctcgtgtcgatgaaaaacaagcaagcatcacggtcagcgttgtctcaggaccggcgtggagcggatatggagaatataaaggaattgcgtcgaactatcttgccgagctgcaagaaggagatacgattacgtgctttatttccacagatcagtcagagtttacgctgccaaaagaccctgaaacgccgcttatcatggtcggaccgggaacaggcgtcgcgccgtttagaggctttgtgcaggcgcgcaaacagctaaaagaacaaggacagtcacttggagaagcacatttatacttcggctgccgttcacctcatgaagactatctgtatcaagaagagcttgaaaacgcccaaagcgaaggcatcattacgcttcataccgctttttctcgcatgccaaatcagccgaaaacatacgttcagcacgtaatggaacaagacggcaagaaattgattgaacttcttgatcaaggagcgcacttctatatttgcggagacggaagccaaatggcacctgccgttgaagcaacgcttatgaaaagctatgctgacgttcaccaagtgagtgaagcagacgctcgcttatggctgcagcagctagaagaaaaaggccgatacgcaaaagacgtgtgggctggg

SEQ ID NO: 194 - protein, 1049 aa, synthetic construct
  REGION 1..1049: note = Variant of cytochrome P450
MTIKEMPQPKTFGELKNLPLLNTDKPVQALMRIADELGEIFKFEAPGSVTRFLSSQRLIKEACDESRFDKNLSQGLKFARDFLGDGLFTSWTHEPNWKKAHNILGPSFSQRAMKRYHAMMVDIAVQLVQKWERLNADEHIEVSEDMTRLTLDTIGLCGFNYRFNSFYRDQPHPFIVSVVRALDEVMNKLQRANPDDPAYDENKRQCQEAIKVMNDYVDKIIADRKARGEQSHDLLTQMLNGKDPETGEPLDDGNIRYQIITFLIAGHETTSGLLSFALYFLVKNPHVLQKVAEEAARVLVDPVPSYKQVKQLKYVGMVLNEALRLWPTAPAFSLYAKEDTVLGGEYPLTKGDEVMVLIPQLHRDKTIWGDDVEEFRPERFENPSAIPQHAFKPFGNGQRACIGQQFALHEATLVLGMMLKHFDFEDHTNYELVIGEKLTLKPEGFVVKAKSKGIPLGGIPSPSTEQSAKKVRKKAENAHNTPLLVLYGSNAGTAEGTARDLADIAMSKGFAPQVATLDSHAGNLPREGAVLIVTASYNGHPPDNAKQFVDWLDQASADEVKGVRYSVFGCGDKNWAATYQKVPAFIDETLAAKGAENIADRGEADASDDFEGAYEEWSDHMWSDVAAYFNLDIENSEDNKSTLSLQFVDSAADMPLAKMHGAFSTNVVASKELQQPGSARSTRHLEIELPKEASYQEGDHLGVIPRNYEGIVNRVTARFGLSASQQIRLEAEEEKLAHLPLAKTVSVEELLQYVELQDPVTRTQLRAMAAKTVCPPHKVELEALLEKQAYKEQVLAKRLTMLELLEKYPACEMKFSEFIALLPSIRPRYYSISSSPRVDEKQASITVSVVSGPAWSGYGEYKGIASNYLAELQEGDTITCFISTDQSEFTLPKDPETPLIMVGPGTGVAPFRGFVQARKQLKEQGQSLGEAHLYFGCRSPHEDYLYQEELENAQSEGIITLHTAFSRMPNQPKTYVQHVMEQDGKKLIELLDQGAHFYICGDGSQMAPAVEATLMKSYADVHQVSEADARLWLQQLEEKGRYAKDVWAG

SEQ ID NO: 195 - DNA, 3147 bp, synthetic construct
  misc_feature 1..3147: note = Variant of cytochrome P450
  source 1..3147: mol_type = other DNA
atgacaattaaggaaatgcctcagcctaagacgtttggagaacttaaaaatttaccgttattaaacacagataaaccggttcaagctttgatgcgtattgcggatgaattaggagaaatctttaaattcgaggcgcctggtagcgtaacgcgctttttatcaagtcagcgtctaattaaagaagcatgcgatgaacgtcgctttgataaaaacttaagtcaaggccttaaatttgcacgtgattttcttggagacgggttatttacaagctggacgcatgaaccgaattggaaaaaagcgcataatatcttaggcccaagctttagtcagcgtgcaatgaaacgttatcatgcgatgatggtcgatatcgccgtgcagcttgttcaaaagtgggagcgtctaaatgcagatgagcatattgaagtatcggaagacatgacacgtttaacgctggatacaattggtctttgcggcttcaactatcgctttaacagcttttaccgagatcagcctcatccatttattgtgagtgttgtgcgtgcactggatgaagtaatgaacaagctgcagcgagcaaatccagacgacccagcttatgatgaaaacaagcgccagtgtcaagaagctatcaaggtgatgaacgactatgtcgataaaattattgcagatcgcaaagcaaggggtgaacaaagccatgatttattaacgcagatgctaaacggaaaagatccagaaacgggtgagccgcttgatgacgggaacattcgttatcaaattattacattcttaattgcgggacacgaaacaacaagtggtcttttatcatttgcgctgtatttcttagtgaaaaatccacatgtattacaaaaagtagcagaagaagcagcacgagttctagtagatcctgttccaagctacaaacaagtcaaacagcttaaatatgtcggcatggtcttaaacgaagcgctgcgcttatggccaactgctcctgcgttttccctatatgcaaaagaagatacggtgcttggaggagaatatcctttaattaaaggcgacgaagtaatggttctgattcctcagcttcaccgtgataaaacaatttggggagacgatgtggaggagttccgtccagagcgttttgaaaatccaagtgcgattccgcagcatgcgtttaaaccgtttggaaacggtcagcgtgcgtgtatcggtcagcagttcgctcttcatgaagcaacgctggtacttggtatgatgctaaaacactttgactttgaagatcatacaaactacgagctcgttattaaagaaaagttaacgttaaaacctgaaggctttgtggtaaaagcaaaatcgaaaggcattccgcttggcctgattccttcacctagcactgaacagtctgctaaaaaagtacgcaaaaaggcagaaaacgctcataatacgccgctgcttgtgctatacggttcaaatgcgggaacagctgaaggaacggcgcgtgatttagcagatattgcaatgagcaaaggatttgcaccgcaggtcgcaacgcttgattcacacgccggaaatcttccgcgcgaaggagctgtattaattgtaacggcgtcttataacggtcatccgcctgataacgcaaagcaatttgtcgactggttagaccaagcgtctgctgatgaagtaaaaggcgttcgctactccgtatttggatgcggcgataaaaactgggctgcgacgtatcaaaaagtgcctgcttttatcgatgaaacgcttgccgctaaaggggcagaaaacatcgctgaccgcggtgaagcagatgcaagcgacgactttgaaggcacatatgaagaatggagtgatcatatgtggagtgacgtagcagcctactttaacctcgacattgaaaacagtgaagataataaatctactctttcacttcaatttgtcgacagcgccgcggatatgccgcttgcgaaaatgcacggtgcgttttcaacgaacgtcgtagcaagcaaagaacttcaacagccaggcagtgcacgaagcacgcgacatcttgaaattgaacttccaaaagaagcttcttatcaagaaggagatcatttaggtgttattcctcgcaactatgaaggaatagtaaaccgtgtaacagcaaggttcggcctaagcgcatcacagcaaatccgtctggaagcagaagaagaaaaattagctcatttgccactcgctaaaacagtatccgtagaagagcttctgcaatacgtggagcttcaagatcctgttacgcgcacgcagcttcgcgcaatggctgcgaaaacggtctgcccgccgcataaagtagagcttgaagccttgcttgaaaagcaagcctacaaagaacaagtgctggcaaaacgtttaacaatgcttgaactgcttgaaaaatacccggcgtgtgaaatgaaattcagcgaatttatcgcccttctgccaagcatacgcccgcgctattactcgatttcttcatcacctcgtgtcgatgaaaaacaagcaagcatcacggtcagcgttgtctcaggaccggcgtggagcggatatggagaatataaaggaattgcgtcgaactatcttgccgagctgcaagaaggagatacgattacgtgctttatttccacagatcagtcagaatttacgctgccaaaagaccctgaaacgccgcttatcatggtcggaccgggaacaggcgtcgcgccgtttagaggctttgtgcaggcgcgcaaacagctaaaagaacaaggacagtcacttggagaagcacatttatacttcggctgccgttcacctcatgaagactatctgtatcaagaagagcttgaaaacgcccaaagcgaaggcatcattacgcttcataccgctttttctcgcatgccaaatcagccgaaaacatacgttcagcacgtaatggaacaagacggcaagaaattgattgaacttcttgatcaaggagcgcacttctatatttgcggagacggaagccaaatggcacctgccgttgaagcaacgcttatgaaaagctatgctgacgttcaccaagtgagtgaagcagacgctcgcttatggctgcagcagctagaagaaaaaggccgatacgcaaaagacgtgtgggctggg

SEQ ID NO: 196 - protein, 1049 aa, synthetic construct
  REGION 1..1049: note = Variant of cytochrome P450
MTIKEMPQPKTFGELKNLPLLNTDKPVQALMRIADELGEIFKFEAPGSVTRFLSSQRLIKEACDERRFDKNLSQGLKFARDFLGDGLFTSWTHEPNWKKAHNILGPSFSQRAMKRYHAMMVDIAVQLVQKWERLNADEHIEVSEDMTRLTLDTIGLCGFNYRFNSFYRDQPHPFIVSVVRALDEVMNKLQRANPDDPAYDENKRQCQEAIKVMNDYVDKIIADRKARGEQSHDLLTQMLNGKDPETGEPLDDGNIRYQIITFLIAGHETTSGLLSFALYFLVKNPHVLQKVAEEAARVLVDPVPSYKQVKQLKYVGMVLNEALRLWPTAPAFSLYAKEDTVLGGEYPLIKGDEVMVLIPQLHRDKTIWGDDVEEFRPERFENPSAIPQHAFKPFGNGQRACIGQQFALHEATLVLGMMLKHFDFEDHTNYELVIKEKLTLKPEGFVVKAKSKGIPLGLIPSPSTEQSAKKVRKKAENAHNTPLLVLYGSNAGTAEGTARDLADIAMSKGFAPQVATLDSHAGNLPREGAVLIVTASYNGHPPDNAKQFVDWLDQASADEVKGVRYSVFGCGDKNWAATYQKVPAFIDETLAAKGAENIADRGEADASDDFEGTYEEWSDHMWSDVAAYFNLDIENSEDNKSTLSLQFVDSAADMPLAKMHGAFSTNVVASKELQQPGSARSTRHLEIELPKEASYQEGDHLGVIPRNYEGIVNRVTARFGLSASQQIRLEAEEEKLAHLPLAKTVSVEELLQYVELQDPVTRTQLRAMAAKTVCPPHKVELEALLEKQAYKEQVLAKRLTMLELLEKYPACEMKFSEFIALLPSIRPRYYSISSSPRVDEKQASITVSVVSGPAWSGYGEYKGIASNYLAELQEGDTITCFISTDQSEFTLPKDPETPLIMVGPGTGVAPFRGFVQARKQLKEQGQSLGEAHLYFGCRSPHEDYLYQEELENAQSEGIITLHTAFSRMPNQPKTYVQHVMEQDGKKLIELLDQGAHFYICGDGSQMAPAVEATLMKSYADVHQVSEADARLWLQQLEEKGRYAKDVWAG

SEQ ID NO: 197 - DNA, 3147 bp, synthetic construct
  misc_feature 1..3147: note = Variant of cytochrome P450
  source 1..3147: mol_type = other DNA
atgacaattaaggaaatgcctcagcctaagacgtttggagaacttaaaaatttaccgttattaaacacagataaaccggttcaagctttgatgcgtattgcggatgaattaggagaaatctttaaattcgaggcgcctggtagcgtaacgcgctttttatcaagtcagcgtctaattaaagaagcatgcgatgaatcacgctttgataaaaacttaagtcaaggccttaaatttgcacgtgattttcttggagacgggttatttacaagctggacgcatgaaccgaattggaaaaaagcgcataatatcttaggcccaagctttagtcagcgtgcaatgaaacgttatcatgcgatgatggtcgatatcgccgtgcagcttgttcaaaagtgggagcgtctaaatgcagatgagcatattgaagtatcggaagacatgacacgtttaacgctggatacaattggtctttgcggcttcaactatcgctttaacagcttttaccgagatcagcctcatccatttattgtgagtgttgtgcgtgcactggatgaagtaatgaacaagctgcagcgagcaaatccagacgacccagcttatgatgaaaacaagcgccagtgtcaagaagctatcaaggtgatgaacgactatgtcgataaaattattgcagatcgcaaagcaaggggtgaacaaagccatgatttattaacgcagatgctaaacggaaaagatccagaaacgggtgagccgcttgatgacgggaacattcgttatcaaattattacattcttaattgcgggacacgaaacaacaagtggtcttttatcatttgcgctgtatttcttagtgaaaaatccacatgtattacaaaaagtagcagaagaagcagcacgagttctagtagatcctgttccaagctacaaacaagtcaaacagcttaaatatgtcggcatggtcttaaacgaagcgctgcgcttatggccaactgctcctgcgttttccctatatgcaaaagaagatacggtgcttggaggagaatatcctttaaccaaaggcgacgaagtaattgttctgattcctcagcttcaccgtgataaaacaatttggggagacgatgtggaggagttccgtccagagcgttttgaaaatccaagtgcgattccgcagcatgcgtttaaaccgtttggaaacggtcagcgtgcgtgtatcggtcagcagttcgctcttcatgaagcaacgctggtacttggtatgatgctaaaacactttgactttgaagatcatacaaactacgagctcgttattaaagaaaagttaacgttaaaacctgaaggctttgtggtaaaagcaaaatcgaaaggcatgccgcttggcctgattccttcacctagcactgaacagtctgctaaaaaagtacgcaaaaaggcagaaaacgctcataatacgccgctgcttgtgctatacggttcaaatgcgggaacagctgaaggaacggcgcgtgatttagcagatattgcaatgagcaaaggatttgcaccgcaggtcgcaacgcttgattcacacgccggaaatcttccgcgcgaaggagctgtattaattgtaacggcgtcttataacggtcatccgcctgataacgcaaagcaatttgtcgactggttagaccaagcgtctgctgatgaagtaaaaggcgttcgctactccgtatttggatgcggcgataaaaactgggctgcgacgtatcaaaaagtgcctgcttttatcgatgaaacgcttgccgctaaaggggcagaaaacatcgctgaccgcggtgaagcagatgcaagcgacgactttgaaggcacatatgaagaatggagtgatcatatgtggagtgacgtagcagcctactttaacctcgacattgaaaacagtgaagataataaatctactctttcacttcaatttgtcgacagcgccgcggatatgccgcttgcgaaaatgcacggtgcgttttcaacgaacgtcgtagcaagcaaagaacttcaacagccaggcagtgcacgaagcacgcgacatcttgaaattgaacttccaaaagaagcttcttatcaagaaggagatcatttaggtgttattcctcgcaactatgaaggaatagtaaaccgtgtaacagcaaggttcggcctaagcgcatcacagcaaatccgtctggaagcagaagaagaaaaattagctcatttgccactcgctaaaacagtatccgtagaagagcttctgcaatacgtggagcttcaagatcctgttacgcgcacgcagcttcgcgcaatggcttcgaaaacggtctgcccgccgcataaagtagagcttgaagccttgcttgaaaagcaagcctacaaagaacaagtgctggcaaaacgtttaacaatgcttgaactgcttgaaaaatacccggcgtgtgaaatgaaattcagcgaatttatcgcccttctgccaagcatacgcccgcgctattactcgatttcttcatcacctcgtgtcgatgaaaaacaagcaagcatcacggtcagcgttgtctcaggaccggcgtggagcggatatggagaatataaaggaattgcgtcgaactatcttgccgagctgcaagaaggagatacgattacgtgctttatttccacagaccagtcagagtttacgctgccaaaagaccctgaaacgccgcttatcatggtcggaccgggaacaggcgtcgcgccgtttagaggctttgtgcaggcgcgcaaacagctaaaagaacaaggacagtcacttggagaagcacatttatacttcggctgccgttcacctcatgaagactatctgtatcaagaagagcttgaaaacgcccaaagcgaaggcatcattacgcttcataccgctttttctcgcatgccaaatcagccgaaaacatacgttcagcacgtaatggaacaagacggcaagaaattgattgaacttcttgatcaaggagcgcacttctatatttgcggagacggaagccaaatggcacctgccgttgaagcaacgcttatgaaaagctatgctgacgttcaccaagtgagtgaagcagacgctcgcttatggctgcagcagctagaagaaaaaggccgatacgcaaaagacgtgtgggctggg

SEQ ID NO: 198 - protein, 1049 aa, synthetic construct
  REGION 1..1049: note = Variant of cytochrome P450
MTIKEMPQPKTFGELKNLPLLNTDKPVQALMRIADELGEIFKFEAPGSVTRFLSSQRLIKEACDESRFDKNLSQGLKFARDFLGDGLFTSWTHEPNWKKAHNILGPSFSQRAMKRYHAMMVDIAVQLVQKWERLNADEHIEVSEDMTRLTLDTIGLCGFNYRFNSFYRDQPHPFIVSVVRALDEVMNKLQRANPDDPAYDENKRQCQEAIKVMNDYVDKIIADRKARGEQSHDLLTQMLNGKDPETGEPLDDGNIRYQIITFLIAGHETTSGLLSFALYFLVKNPHVLQKVAEEAARVLVDPVPSYKQVKQLKYVGMVLNEALRLWPTAPAFSLYAKEDTVLGGEYPLTKGDEVIVLIPQLHRDKTIWGDDVEEFRPERFENPSAIPQHAFKPFGNGQRACIGQQFALHEATLVLGMMLKHFDFEDHTNYELVIKEKLTLKPEGFVVKAKSKGMPLGLIPSPSTEQSAKKVRKKAENAHNTPLLVLYGSNAGTAEGTARDLADIAMSKGFAPQVATLDSHAGNLPREGAVLIVTASYNGHPPDNAKQFVDWLDQASADEVKGVRYSVFGCGDKNWAATYQKVPAFIDETLAAKGAENIADRGEADASDDFEGTYEEWSDHMWSDVAAYFNLDIENSEDNKSTLSLQFVDSAADMPLAKMHGAFSTNVVASKELQQPGSARSTRHLEIELPKEASYQEGDHLGVIPRNYEGIVNRVTARFGLSASQQIRLEAEEEKLAHLPLAKTVSVEELLQYVELQDPVTRTQLRAMASKTVCPPHKVELEALLEKQAYKEQVLAKRLTMLELLEKYPACEMKFSEFIALLPSIRPRYYSISSSPRVDEKQASITVSVVSGPAWSGYGEYKGIASNYLAELQEGDTITCFISTDQSEFTLPKDPETPLIMVGPGTGVAPFRGFVQARKQLKEQGQSLGEAHLYFGCRSPHEDYLYQEELENAQSEGIITLHTAFSRMPNQPKTYVQHVMEQDGKKLIELLDQGAHFYICGDGSQMAPAVEATLMKSYADVHQVSEADARLWLQQLEEKGRYAKDVWAG

SEQ ID NO: 199 - DNA, 3147 bp, synthetic construct
  misc_feature 1..3147: note = Variant of cytochrome P450
  source 1..3147: mol_type = other DNA
atgacaattaaggaaatgcctcagcctaagacgtttggagaacttaaaaatttaccgttattaaacacagataaaccggttcaagctttgatgcgtattgcggatgaattaggagaaatctttaaattcgaggcgcctggtagcgtaacgcgctttttatcaagtcagcgtctaattaaagaagcatgcgatgaacgtcgctttgataaaaacttaagtcaaggccttaaatttgcacgtgattttcttggagacgggttatttacaagctggacgcatgaaccgaattggaaaaaagcgcataatatcttaggcccaagctttagtcagcgtgcaatgaaacgttatcatgcgatgatggtcgatatcgccgtgcagcttgttcaaaagtgggagcgtctaaatgcagatgagcatattgaagtatcggaagacatgacacgtttaacgctggatacaattggtctttgcggcttcaactatcgctttaacagcttttaccgagatcagcctcatccatttattgtgagtgttgtgcgtgcactggatgaagtaatgaacaagctgcagcgagcaaatccagacgacccagcttatgatgaaaacaagcgccagtgtcaagaagatatcaaggtgatgaacgactatgtcgataaaattattgcagatcgcaaagcaaggggtgaacaaagccatgatttattaacgcagatgctaaacggaaaagatccagaaacgggtgagccgcttgatgacgggaacattcgttatcaaattattacattcttaattgcgggacacgaaacaacaagtggtcttttatcatttgcgctgtatttcttagtgaaaaatccacatgtattacaaaaagtagcagaagaagcagcacgagttctagtagatcctgttccaagctacaaacaagtcaaacagcttaaatatgtcggcatggtcttaaacgaagcgctgcgcttatggccaactgctcctgcgttttccctatatgcaaaagaagatacggtgcttggaggagaatatcctttaaccaaaggcgacgaagtaattgttctgattcctcagcttcaccgtgataaaacaatttggggagacgatgtggaggagttccgtccagagcgttttgaaaatccaagtgcgattccgcagcatgcgtttaaaccgtttggaaacggtcagcgtgcgtgtatcggtcagcagttcgctcttcatgaagcaacgctggtacttggtatgatgctaaaacactttgactttgaagatcatacaaactacgagctcgttattaaagaaaagttaacgttaaaacctgaaggctttgtggtaaaagcaaaatcgaaaggcatgccgcttggcctgattccttcacctagcactgaacagtctgctaaaaaagtacgcaaaaaggcagaaaacgctcataatacgccgctgcttgtgctatacggttcaaatgcgggaacagctgaaggaacggcgcgtgatttagcagatattgcaatgagcaaaggatttgcaccgcaggtcgcaacgcttgattcacacgccggaaatcttccgcgcgaaggagctgtattaattgtaacggcgtcttataacggtcatccgcctgataacgcaaagcaatttgtcgactggttaggtcaagcgtctgctgatgaagtaaaaggcgttcgctactccgtatttggatgcggcgataaaaactgggctgcgacgtatcaaaaagtgcctgcttttatcgatgaaacgcttgccgctaaaggggcagaaaacatcgctgaccgcggtgaagcagatgcaagcgacgactttgaaggcacatatgaagaatggagtgatcatatgtggagtgacgtagcagcctactttaacctcgacattgaaaacagtgaagataataaatctactctttcacttcaatttgtcgacagcgccgcggatatgccgcttgcgaaaatgcacggtgcgttttcaacgaacgtcgtagcaagcaaagaacttcaacagccaggcagtgcacgaagcacgcgacatcttgaaattgaacttccaaaagaagcttcttatcaagaaggagatcatttaggtgttattcctcgcaactatgaaggaatagtaaaccgtgtaacagcaaggttcggcctaagcgcatcacagcaaatccgtctggaagcagaagaagaaaaattagctcatttgccactcgctaaaacagtatccgtagaagagcttctgcaatacgtggagcttcaagatcctgttacgcgcacgcagcttcgcgcaatggctgctaaaacggtctgcccgccgcataaagtagagcttgaagccttgcttgaaaagcaagcctacaaagaacaagtgctggcaaaacgtttaacaatgcttgaactgcttgaaaaatacccggcgtgtgaaatgaaattcagcgaatttatcgcccttctgccaagcatacgcccgcgctattactcgatttcttcatcacctcgtgtcgatgaaaaacaagcaagcatcacggtcagcgttgtctcaggaccggcgtggagcggatatggagaatataaaggaattgcgtcgaactatcttgccgagctgcaagaaggagatacgattacgtgctttatttccacagaccagtcagggtttacgctgccaaaagaccctgaaacgccgcttatcatggtcggaccgggaacaggcgtcgcgccgtttagaggctttgtgcaggcgcgcaaacagctaaaagaacaaggacagtcacttggacgcgcacatttatacttcggctgccgttcacctcatgaagactatctgtatcaagaagagcttgaaaacgcccaaagcgaaggcatcattacgcttcataccgctttttctcgcatgccaaatcagccgaaaacatacgttcagcacgtaatggaacaagacggcaagaaattgattgaacttcttgatcaaggagcgcacttctatatttgcggagacggaagccaaatggcacctgccgttgaagcaacgcttatgaaaagctatgctgacgttcaccaagtgagtgaagcagacgctcgcttatggctgcagcagctagaagaaaaaggccgatacgcaaaagacgtgtgggctggg

SEQ ID NO: 200 - protein, 1049 aa, synthetic construct
  REGION 1..1049: note = Variant of cytochrome P450
MTIKEMPQPKTFGELKNLPLLNTDKPVQALMRIADELGEIFKFEAPGSVTRFLSSQRLIKEACDERRFDKNLSQGLKFARDFLGDGLFTSWTHEPNWKKAHNILGPSFSQRAMKRYHAMMVDIAVQLVQKWERLNADEHIEVSEDMTRLTLDTIGLCGFNYRFNSFYRDQPHPFIVSVVRALDEVMNKLQRANPDDPAYDENKRQCQEDIKVMNDYVDKIIADRKARGEQSHDLLTQMLNGKDPETGEPLDDGNIRYQIITFLIAGHETTSGLLSFALYFLVKNPHVLQKVAEEAARVLVDPVPSYKQVKQLKYVGMVLNEALRLWPTAPAFSLYAKEDTVLGGEYPLTKGDEVIVLIPQLHRDKTIWGDDVEEFRPERFENPSAIPQHAFKPFGNGQRACIGQQFALHEATLVLGMMLKHFDFEDHTNYELVIKEKLTLKPEGFVVKAKSKGMPLGLIPSPSTEQSAKKVRKKAENAHNTPLLVLYGSNAGTAEGTARDLADIAMSKGFAPQVATLDSHAGNLPREGAVLIVTASYNGHPPDNAKQFVDWLGQASADEVKGVRYSVFGCGDKNWAATYQKVPAFIDETLAAKGAENIADRGEADASDDFEGTYEEWSDHMWSDVAAYFNLDIENSEDNKSTLSLQFVDSAADMPLAKMHGAFSTNVVASKELQQPGSARSTRHLEIELPKEASYQEGDHLGVIPRNYEGIVNRVTARFGLSASQQIRLEAEEEKLAHLPLAKTVSVEELLQYVELQDPVTRTQLRAMAAKTVCPPHKVELEALLEKQAYKEQVLAKRLTMLELLEKYPACEMKFSEFIALLPSIRPRYYSISSSPRVDEKQASITVSVVSGPAWSGYGEYKGIASNYLAELQEGDTITCFISTDQSGFTLPKDPETPLIMVGPGTGVAPFRGFVQARKQLKEQGQSLGRAHLYFGCRSPHEDYLYQEELENAQSEGIITLHTAFSRMPNQPKTYVQHVMEQDGKKLIELLDQGAHFYICGDGSQMAPAVEATLMKSYADVHQVSEADARLWLQQLEEKGRYAKDVWAG

SEQ ID NO: 201 - DNA, 3147 bp, synthetic construct
  misc_feature 1..3147: note = Variant of cytochrome P450
  source 1..3147: mol_type = other DNA
atgacaattaaggaaatgcctcagcctaagacgtttggagaacttaaaaatttaccgttattaaacacagataaaccggttcaagctttgatgcgtattgcggatgaattaggagaaatctttaaattcgaggcgcctggtagcgtaacgcgctttttatcaagtcagcgtctaattaaagaagcatgcgatgaatcacgctttgataaaaacttaagtcaaggccttaaatttgcacgtgattttcttggagacgggttatttacaagctggacgcatgaaccgaattggaaaaaagcgcataatatcttaggcccaagctttagtcagcgtgcaatgaaacgttatcatgcgatgatggtcgatatcgccgtgcagcttgttcaaaagtgggagcgtctaaatgcagatgagcatattgaagtatcggaagacatgacacgtttaacgctggatacaattggtctttgcggcttcaactatcgctttaacagcttttaccgagatcagcctcatccatttattgtgagtgttgtgcgtgcactggatgaagtaatgaacaagctgcagcgagcaaatccagacgacccagcttatgatgaaaacaagcgccagtgtcaagaagctatcaaggtgatgaacgactatgtcgataaaattattgcagatcgcaaagcaaggggtgaacaaagccatgatttattaacgcagatgctaaacggaaaagatccagaaacgggtgagccgcttgatgacgggaacattcgttatcaaattattacattcttaattgcgggacacgaaacaacaagtggtcttttatcatttgcgctgtatttcttagtgaaaaatccacatgtattacaaaaagtagcagaagaagcagcacgagttctagtagatcctgttccaagctacaaacaagtcaaacagcttaaatatgtcggcatggtcttaaacgaagcgctgcgcttatggccaactgctcctgcgttttccctatatgcaaaagaagatacggtgcttggaggagaatatcctttaattaaaggcgacgaagtaattgttctgattcctcagcttcaccgtgataaaacaatttggggagacgatgtggaggagttccgtccagagcgttttgaaaatccaagtgcgattccgcagcatgcgtttaaaccgtttggaaacggtcagcgtgcgtgtatcggtcagcagttcgctcttcatgaagcaacgctggtacttggtatgatgctaaaacactttgactttgaagatcatacaaactacgagctcgttattggcgaaaagttaacgttaaaacctgaaggctttgtggtaaaagcaaaatcgaaaggcattccgcttggcggcattccttcacctagcactgaacagtctgctaaaaaagtacgcaaaaaggcagaaaacgctcataatacgccgctgcttgtgctatacggttcaaatgcgggaacagctgaaggaacggcgcgtgatttagcagatattgcaatgagcaaaggatttgcaccgcaggtcgcaacgcttgattcacacgccggaaatcttccgcgcgaaggagctgtattaattgtaacggcgtcttataacggtcatccgcctgataacgcaaagcaatttgtcgactggttagaccaagcgtctgctgatgaagtaaaaggcgttcgctactccgtatttggatgcggcgataaaaactgggctgcgacgtatcaaaaagtgcctgcttttatcgatgaaacgcttgccgctaaaggggcagaaaacatcgctgaccgcggtgaagcagatgcaagcgacgactttgaaggcacatatgaagaatggagtgatcatatgtggagtgacgtagcagcctactttaacctcgacattgaaaacagtgaagataataaatctactctttcacttcaatttgtcgacagcgccgcggatatgccgcttgcgaaaatgcacggtgcgttttcaacgaacgtcgtagcaagcaaagaacttcaacagccaggcagtgcacgaagcacgcgacatcttgaaattgaacttccaaaagaagcttcttatcaagaaggagatcatttaggtgttattcctcgcaactatgaaggaatagtaaaccgtgtaacagcaaggttcggcctaagcgcatcacagcaaatccgtctggaagcagaagaagaaaaattagctcatttgccactcgctaaaacagtatccgtagaagagcttctgcaatacgtggagcttcaagatcctgttacgcgcacgcagcttcgcgcaatggcttcgaaaacggtctgcccgccgcataaagtagagcttgaagccttgcttgaaaagcaagcctacaaagaacaagtgctggcaaaacgtttaacaatgcttgaactgcttgaaaaatacccggcgtgtgaaatgaaattcagcgaatttatcgcccttctgccaagcatacgcccgcgctattactcgatttcttcatcacctcgtgtcgatgaaaaacaagcaagcatcacggtcagcgttgtctcaggaccggcgtggagcggatatggagaatataaaggaattgcgtcgaactatcttgccgagctgcaagaaggagatacgattacgtgctttatttccacagaccagtcagggtttacgctgccaaaagaccctgaaacgccgcttatcatggtcggaccgggaacaggcgtcgcgccgtttagaggctttgtgcaggcgcgcaaacagctaaaagaacaaggacagtcacttggagaggcacatttatacttcggctgccgttcacctcatgaagactatctgtatcaagaagagcttgaaaacgcccaaagcgaaggcatcattacgcttcataccgctttttctcgcatgccaaatcagccgaaaacatacgttcagcacgtaatggaacaagacggcaagaaattgattgaacttcttgatcaaggagcgcacttctatatttgcggagacggaagccaaatggcacctgccgttgaagcaacgcttatgaaaagctatgctgacgttcaccaagtgagtgaagcagacgctcgcttatggctgcagcagctagaagaaaaaggccgatacgcaaaagacgtgtgggctggg

SEQ ID NO: 202 - protein, 1049 aa, synthetic construct
  REGION 1..1049: note = Variant of cytochrome P450
MTIKEMPQPKTFGELKNLPLLNTDKPVQALMRIADELGEIFKFEAPGSVTRFLSSQRLIKEACDESRFDKNLSQGLKFARDFLGDGLFTSWTHEPNWKKAHNILGPSFSQRAMKRYHAMMVDIAVQLVQKWERLNADEHIEVSEDMTRLTLDTIGLCGFNYRFNSFYRDQPHPFIVSVVRALDEVMNKLQRANPDDPAYDENKRQCQEAIKVMNDYVDKIIADRKARGEQSHDLLTQMLNGKDPETGEPLDDGNIRYQIITFLIAGHETTSGLLSFALYFLVKNPHVLQKVAEEAARVLVDPVPSYKQVKQLKYVGMVLNEALRLWPTAPAFSLYAKEDTVLGGEYPLIKGDEVIVLIPQLHRDKTIWGDDVEEFRPERFENPSAIPQHAFKPFGNGQRACIGQQFALHEATLVLGMMLKHFDFEDHTNYELVIGEKLTLKPEGFVVKAKSKGIPLGGIPSPSTEQSAKKVRKKAENAHNTPLLVLYGSNAGTAEGTARDLADIAMSKGFAPQVATLDSHAGNLPREGAVLIVTASYNGHPPDNAKQFVDWLDQASADEVKGVRYSVFGCGDKNWAATYQKVPAFIDETLAAKGAENIADRGEADASDDFEGTYEEWSDHMWSDVAAYFNLDIENSEDNKSTLSLQFVDSAADMPLAKMHGAFSTNVVASKELQQPGSARSTRHLEIELPKEASYQEGDHLGVIPRNYEGIVNRVTARFGLSASQQIRLEAEEEKLAHLPLAKTVSVEELLQYVELQDPVTRTQLRAMASKTVCPPHKVELEALLEKQAYKEQVLAKRLTMLELLEKYPACEMKFSEFIALLPSIRPRYYSISSSPRVDEKQASITVSVVSGPAWSGYGEYKGIASNYLAELQEGDTITCFISTDQSGFTLPKDPETPLIMVGPGTGVAPFRGFVQARKQLKEQGQSLGEAHLYFGCRSPHEDYLYQEELENAQSEGIITLHTAFSRMPNQPKTYVQHVMEQDGKKLIELLDQGAHFYICGDGSQMAPAVEATLMKSYADVHQVSEADARLWLQQLEEKGRYAKDVWAG

SEQ ID NO: 203 - DNA, 3147 bp, synthetic construct
  misc_feature 1..3147: note = Variant of cytochrome P450
  source 1..3147: mol_type = other DNA
atgacaattaaggaaatgcctcagcctaagacgtttggagaacttaaaaatttaccgttattaaacacagataaaccggttcaagctttgatgcgtattgcggatgaattaggagaaatctttaaattcgaggcgcctggtagcgtaacgcgctttttatcaagtcagcgtctaattaaagaagcatgcgatgaacgtcgctttgataaaaacttaagtcaaggccttaaatttgcacgtgattttcttggagacgggttatttacaagctggacgcatgaaccgaattggaaaaaagcgcataatatcttaggcccaagctttagtcagcgtgcaatgaaacgttatcatgcgatgatggtcgatatcgccgtgcagcttgttcaaaagtgggagcgtctaaatgcagatgagcatattgaagtatcggaagacatgacacgtttaacgctggatacaattggtctttgcggcttcaactatcgctttaacagcttttaccgagatcagcctcatccatttattgtgagtgttgtgcgtgcactggatgaagtaatgaacaagctgcagcgagcaaatccagacgacccagcttatgatgaaaacaagcgccagtgtcaagaagatatcaaggtgatgaacgactatgtcgataaaattattgcagatcgcaaagcaaggggtgaacaaagccatgatttattaacgcagatgctaaacggaaaagatccagaaacgggtgagccgcttgatgacgggaacattcgttatcaaattattacattcttaattgcgggacacgaaacaacaagtggtcttttatcatttgcgctgtatttcttagtgaaaaatccacatgtattacaaaaagtagcagaagaagcagcacgagttctagtagatcctgttccaagctacaaacaagtcaaacagcttaaatatgtcggcatggtcttaaacgaagcgctgcgcttatggccaactgctcctgcgttttccctatatgcaaaagaagatacggtgcttggaggagaatatcctttaaccaaaggcgacgaagtaattgttctgattcctcagcttcaccgtgataaaacaatttggggagacgatgtggaggagttccgtccagagcgttttgaaaatccaagtgcgattccgcagcatgcgtttaaaccgtttggaaacggtcagcgtgcgtgtatcggtcagcagttcgctcttcatgaagcaacgctggtacttggtatgatgctaaaacactttgactttgaagatcatacaaactacgagctcgttattggcgaaaagttaacgttaaaacctgaaggctttgtggtaaaagcaaaatcgaaaggcatgccgcttggcctgattccttcacctagcactgaacagtctgctaaaaaagtacgcaaaaaggcagaaaacgctcataatacgccgctgcttgtgctatacggttcaaatgcgggaacagctgaaggaacggcgcgtgatttagcagatattgcaatgagcaaaggatttgcaccgcaggtcgcaacgcttgattcacacgccggaaatcttccgcgcgaaggagctgtattaattgtaacggcgtcttataacggtcatccgcctgataacgcaaagcaatttgtcgactggttaggtcaagcgtctgctgatgaagtaaaaggcgttcgctactccgtatttggatgcggcgataaaaactgggctgcgacgtatcaaaaagtgcctgcttttatcgatgaaacgcttgccgctaaaggggcagaaaacatcgctgaccgcggtgaagcagatgcaagcgacgactttgaaggcgcgtatgaagaatggagtgatcatatgtggagtgacgtagcagcctactttaacctcgacattgaaaacagtgaagataataaatctactctttcacttcaatttgtcgacagcgccgcggatatgccgcttgcgaaaatgcacggtgcgttttcaacgaacgtcgtagcaagcaaagaacttcaacagccaggcagtgcacgaagcacgcgacatcttgaaattgaacttccaaaagaagcttcttatcaagaaggagatcatttaggtgttattcctcgcaactatgaaggaatagtaaaccgtgtaacagcaaggttcggcctaagcgcatcacagcaaatccgtctggaagcagaagaagaaaaattagctcatttgccactcgctaaaacagtatccgtagaagagcttctgcaatacgtggagcttcaagatcctgttacgcgcacgcagcttcgcgcaatggcttcgaaaacggtctgcccgccgcataaagtagagcttgaagccttgcttgaaaagcaagcctacaaagaacaagtgctggcaaaacgtttaacaatgcttgaactgcttgaaaaatacccggcgtgtgaaatgaaattcagcgaatttatcgcccttctgccaagcatacgcccgcgctattactcgatttcttcatcacctcgtgtcgatgaaaaacaagcaagcatcacggtcagcgttgtctcaggaccggcgtggagcggatatggagaatataaaggaattgcgtcgaactatcttgccgagctgcaagaaggagatacgattacgtgctttatttccacagaccagtcagggtttacgctgccaaaagaccctgaaacgccgcttatcatggtcggaccgggaacaggcgtcgcgccgtttagaggctttgtgcaggcgcgcaaacagctaaaagaacaaggacagtcacttggagaggcacatttatacttcggctgccgttcacctcatgaagactatctgtatcaagaagagcttgaaaacgcccaaagcgaaggcatcattacgcttcataccgctttttctcgcatgccaaatcagccgaaaacatacgttcagcacgtaatggaacaagacggcaagaaattgattgaacttcttgatcaaggagcgcacttctatatttgcggagacggaagccaaatggcacctgccgttgaagcaacgcttatgaaaagctatgctgacgttcaccaagtgagtgaagcagacgctcgcttatggctgcagcagctagaagaaaaaggccgatacgcaaaagacgtgtgggctggg

SEQ ID NO: 204 - protein, 1049 aa, synthetic construct
  REGION 1..1049: note = Variant of cytochrome P450
MTIKEMPQPKTFGELKNLPLLNTDKPVQALMRIADELGEIFKFEAPGSVTRFLSSQRLIKEACDERRFDKNLSQGLKFARDFLGDGLFTSWTHEPNWKKAHNILGPSFSQRAMKRYHAMMVDIAVQLVQKWERLNADEHIEVSEDMTRLTLDTIGLCGFNYRFNSFYRDQPHPFIVSVVRALDEVMNKLQRANPDDPAYDENKRQCQEDIKVMNDYVDKIIADRKARGEQSHDLLTQMLNGKDPETGEPLDDGNIRYQIITFLIAGHETTSGLLSFALYFLVKNPHVLQKVAEEAARVLVDPVPSYKQVKQLKYVGMVLNEALRLWPTAPAFSLYAKEDTVLGGEYPLTKGDEVIVLIPQLHRDKTIWGDDVEEFRPERFENPSAIPQHAFKPFGNGQRACIGQQFALHEATLVLGMMLKHFDFEDHTNYELVIGEKLTLKPEGFVVKAKSKGMPLGLIPSPSTEQSAKKVRKKAENAHNTPLLVLYGSNAGTAEGTARDLADIAMSKGFAPQVATLDSHAGNLPREGAVLIVTASYNGHPPDNAKQFVDWLGQASADEVKGVRYSVFGCGDKNWAATYQKVPAFIDETLAAKGAENIADRGEADASDDFEGAYEEWSDHMWSDVAAYFNLDIENSEDNKSTLSLQFVDSAADMPLAKMHGAFSTNVVASKELQQPGSARSTRHLEIELPKEASYQEGDHLGVIPRNYEGIVNRVTARFGLSASQQIRLEAEEEKLAHLPLAKTVSVEELLQYVELQDPVTRTQLRAMASKTVCPPHKVELEALLEKQAYKEQVLAKRLTMLELLEKYPACEMKFSEFIALLPSIRPRYYSISSSPRVDEKQASITVSVVSGPAWSGYGEYKGIASNYLAELQEGDTITCFISTDQSGFTLPKDPETPLIMVGPGTGVAPFRGFVQARKQLKEQGQSLGEAHLYFGCRSPHEDYLYQEELENAQSEGIITLHTAFSRMPNQPKTYVQHVMEQDGKKLIELLDQGAHFYICGDGSQMAPAVEATLMKSYADVHQVSEADARLWLQQLEEKGRYAKDVWAG

SEQ ID NO: 205 - DNA, 3147 bp, synthetic construct
  misc_feature 1..3147: note = Variant of cytochrome P450
  source 1..3147: mol_type = other DNA
atgacaattaaggaaatgcctcagcctaagacgtttggagaacttaaaaatttaccgttattaaacacagataaaccggttcaagctttgatgcgtattgcggatgaattaggagaaatctttaaattcgaggcgcctggtagcgtaacgcgctttttatcaagtcagcgtctaattaaagaagcatgcgatgaatcacgctttgataaaaacttaagtcaaggccttaaatttgcacgtgattttcttggagacgggttatttacaagctggacgcatgaaccgaattggaaaaaagcgcataatatcttaggcccaagctttagtcagcgtgcaatgaaacgttatcatgcgatgatggtcgatatcgccgtgcagcttgttcaaaagtgggagcgtctaaatgcagatgagcatattgaagtatcggaagacatgacacgtttaacgctggatacaattggtctttgcggcttcaactatcgctttaacagcttttaccgagatcagcctcatccatttattgtgagtgttgtgcgtgcactggatgaagtaatgaacaagctgcagcgagcaaatccagacgacccagcttatgatgaaaacaagcgccagtgtcaagaagctatcaaggtgatgaacgactatgtcgataaaattattgcagatcgcaaagcaaggggtgaacaaagccatgatttattaacgcagatgctaaacggaaaagatccagaaacgggtgagccgcttgatgacgggaacattcgttatcaaattattacattcttaattgcgggacacgaaacaacaagtggtcttttatcatttgcgctgtatttcttagtgaaaaatccacatgtattacaaaaagtagcagaagaagcagcacgagttctagtagatcctgttccaagctacaaacaagtcaaacagcttaaatatgtcggcatggtcttaaacgaagcgctgcgcttatggccaactgctcctgcgttttccctatatgcaaaagaagatacggtgcttggaggagaatatcctttaaccaaaggcgacgaagtaatggttctgattcctcagcttcaccgtgataaaacaatttggggagacgatgtggaggagttccgtccagagcgttttgaaaatccaagtgcgattccgcagcatgcgtttaaaccgtttggaaacggtcagcgtgcgtgtatcggtcagcagttcgctcttcatgaagcaacgctggtacttggtatgatgctaaaacactttgactttgaagatcatacaaactacgagctcgttattaaagaaaagttaacgttaaaacctgaaggctttgtggtaaaagcaaaatcgaaaggcattccgcttggcctgattccttcacctagcactgaacagtctgctaaaaaagtacgcaaaaaggcagaaaacgctcataatacgccgctgcttgtgctatacggttcaaatgcgggaacagctgaaggaacggcgcgtgatttagcagatattgcaatgagcaaaggatttgcaccgcaggtcgcaacgcttgattcacacgccggaaatcttccgcgcgaaggagctgtattaattgtaacggcgtcttataacggtcatccgcctgataacgcaaagcaatttgtcgactggttaggtcaagcgtctgctgatgaagtaaaaggcgttcgctactccgtatttggatgcggcgataaaaactgggctgcgacgtatcaaaaagtgcctgcttttatcgatgaaacgcttgccgctaaaggggcagaaaacatcgctgaccgcggtgaagcagatgcaagcgacgactttgaaggcgcgtatgaagaatggagtgatcatatgtggagtgacgtagcagcctactttaacctcgacattgaaaacagtgaagataataaatctactctttcacttcaatttgtcgacagcgccgcggatatgccgcttgcgaaaatgcacggtgcgttttcaacgaacgtcgtagcaagcaaagaacttcaacagccaggcagtgcacgaagcacgcgacatcttgaaattgaacttccaaaagaagcttcttatcaagaaggagatcatttaggtgttattcctcgcaactatgaaggaatagtaaaccgtgtaacagcaaggttcggcctaagcgcatcacagcaaatccgtctggaagcagaagaagaaaaattagctcatttgccactcgctaaaacagtatccgtagaagagcttctgcaatacgtggagcttcaagatcctgttacgcgcacgcagcttcgcgcaatggctgcgaaaacggtctgcccgccgcataaagtagagcttgaagccttgcttgaaaagcaagcctacaaagaacaagtgctggcaaaacgtttaacaatgcttgaactgcttgaaaaatacccggcgtgtgaaatgaaattcagcgaatttatcgcccttctgccaagcatacgcccgcgctattactcgatttcttcatcacctcgtgtcgatgaaaaacaagcaagcatcacggtcagcgttgtctcaggaccggcgtggagcggatatggagaatataaaggaattgcgtcgaactatcttgccgagctgcaagaaggagatacgattacgtgctttatttccacagatcagtcagaatttacgctgccaaaagaccctgaaacgccgcttatcatggtcggaccgggaacaggcgtcgcgccgtttagaggctttgtgcaggcgcgcaaacagctaaaagaacaaggacagtcacttggagaagcacatttatacttcggctgccgttcacctcatgaagactatctgtatcaagaagagcttgaaaacgcccaaagcgaaggcatcattacgcttcataccgctttttctcgcatgccaaatcagccgaaaacatacgttcagcacgtaatggaacaagacggcaagaaattgattgaacttcttgatcaaggagcgcacttctatatttgcggagacggaagccaaatggcacctgccgttgaagcaacgcttatgaaaagctatgctgacgttcaccaagtgagtgaagcagacgctcgcttatggctgcagcagctagaagaaaaaggccgatacgcaaaagacgtgtgggctggg

SEQ ID NO: 206 - protein, 1049 aa, synthetic construct
  REGION 1..1049: note = Variant of cytochrome P450
MTIKEMPQPKTFGELKNLPLLNTDKPVQALMRIADELGEIFKFEAPGSVTRFLSSQRLIKEACDESRFDKNLSQGLKFARDFLGDGLFTSWTHEPNWKKAHNILGPSFSQRAMKRYHAMMVDIAVQLVQKWERLNADEHIEVSEDMTRLTLDTIGLCGFNYRFNSFYRDQPHPFIVSVVRALDEVMNKLQRANPDDPAYDENKRQCQEAIKVMNDYVDKIIADRKARGEQSHDLLTQMLNGKDPETGEPLDDGNIRYQIITFLIAGHETTSGLLSFALYFLVKNPHVLQKVAEEAARVLVDPVPSYKQVKQLKYVGMVLNEALRLWPTAPAFSLYAKEDTVLGGEYPLTKGDEVMVLIPQLHRDKTIWGDDVEEFRPERFENPSAIPQHAFKPFGNGQRACIGQQFALHEATLVLGMMLKHFDFEDHTNYELVIKEKLTLKPEGFVVKAKSKGIPLGLIPSPSTEQSAKKVRKKAENAHNTPLLVLYGSNAGTAEGTARDLADIAMSKGFAPQVATLDSHAGNLPREGAVLIVTASYNGHPPDNAKQFVDWLGQASADEVKGVRYSVFGCGDKNWAATYQKVPAFIDETLAAKGAENIADRGEADASDDFEGAYEEWSDHMWSDVAAYFNLDIENSEDNKSTLSLQFVDSAADMPLAKMHGAFSTNVVASKELQQPGSARSTRHLEIELPKEASYQEGDHLGVIPRNYEGIVNRVTARFGLSASQQIRLEAEEEKLAHLPLAKTVSVEELLQYVELQDPVTRTQLRAMAAKTVCPPHKVELEALLEKQAYKEQVLAKRLTMLELLEKYPACEMKFSEFIALLPSIRPRYYSISSSPRVDEKQASITVSVVSGPAWSGYGEYKGIASNYLAELQEGDTITCFISTDQSEFTLPKDPETPLIMVGPGTGVAPFRGFVQARKQLKEQGQSLGEAHLYFGCRSPHEDYLYQEELENAQSEGIITLHTAFSRMPNQPKTYVQHVMEQDGKKLIELLDQGAHFYICGDGSQMAPAVEATLMKSYADVHQVSEADARLWLQQLEEKGRYAKDVWAG

SEQ ID NO: 207 - DNA, 3147 bp, synthetic construct
  misc_feature 1..3147: note = Variant of cytochrome P450
  source 1..3147: mol_type = other DNA
atgacaattaaggaaatgcctcagcctaagacgtttggagaacttaaaaatttaccgttattaaacacagataaaccggttcaagctttgatgcgtattgcggatgaattaggagaaatctttaaattcgaggcgcctggtagcgtaacgcgctttttatcaagtcagcgtctaattaaagaagcatgcgatgaacgtcgctttgataaaaacttaagtcaaggccttaaatttgcacgtgattttcttggagacgggttatttacaagctggacgcatgaaccgaattggaaaaaagcgcataatatcttaggcccaagctttagtcagcgtgcaatgaaacgttatcatgcgatgatggtcgatatcgccgtgcagcttgttcaaaagtgggagcgtctaaatgcagatgagcatattgaagtatcggaagacatgacacgtttaacgctggatacaattggtctttgcggcttcaactatcgctttaacagcttttaccgagatcagcctcatccatttattgtgagtgttgtgcgtgcactggatgaagtaatgaacaagctgcagcgagcaaatccagacgacccagcttatgatgaaaacaagcgccagtgtcaagaagctatcaaggtgatgaacgactatgtcgataaaattattgcagatcgcaaagcaaggggtgaacaaagccatgatttattaacgcagatgctaaacggaaaagatccagaaacgggtgagccgcttgatgacgggaacattcgttatcaaattattacattcttaattgcgggacacgaaacaacaagtggtcttttatcatttgcgctgtatttcttagtgaaaaatccacatgtattacaaaaagtagcagaagaagcagcacgagttctagtagatcctgttccaagctacaaacaagtcaaacagcttaaatatgtcggcatggtcttaaacgaagcgctgcgcttatggccaactgctcctgcgttttccctatatgcaaaagaagatacggtgcttggaggagaatatcctttaattaaaggcgacgaagtaatggttctgattcctcagcttcaccgtgataaaacaatttggggagacgatgtggaggagttccgtccagagcgttttgaaaatccaagtgcgattccgcagcatgcgtttaaaccgtttggaaacggtcagcgtgcgtgtatcggtcagcagttcgctcttcatgaagcaacgctggtacttggtatgatgctaaaacactttgactttgaagatcatacaaactacgagctcgttattaaagaaaagttaacgttaaaacctgaaggctttgtggtaaaagcaaaatcgaaaggcattccgcttggcggtattccttcacctagcactgaacagtctgctaaaaaagtacgcaaaaaggcagaaaacgctcataatacgccgctgcttgtgctatacggttcaaatgcgggaacagctgaaggaacggcgcgtgatttagcagatattgcaatgagcaaaggatttgcaccgcaggtcgcaacgcttgattcacacgccggaaatcttccgcgcgaaggagctgtattaattgtaacggcgtcttataacggtcatccgcctgataacgcaaagcaatttgtcgactggttagaccaagcgtctgctgatgaagtaaaaggcgttcgctactccgtatttggatgcggcgataaaaactgggctgcgacgtatcaaaaagtgcctgcttttatcgatgaaacgcttgccgctaaaggggcagaaaacatcgctgaccgcggtgaagcagatgcaagcgacgactttgaaggcacgtatgaagaatggagtgatcatatgtggagtgacgtagcagcctactttaacctcgacattgaaaacagtgaagataataaatctactctttcacttcaatttgtcgacagcgccgcggatatgccgcttgcgaaaatgcacggtgcgttttcaacgaacgtcgtagcaagcaaagaacttcaacagccaggcagtgcacgaagcacgcgacatcttgaaattgaacttccaaaagaagcttcttatcaagaaggagatcatttaggtgttattcctcgcaactatgaaggaatagtaaaccgtgtaacagcaaggttcggcctaagcgcatcacagcaaatccgtctggaagcagaagaagaaaaattagctcatttgccactcgctaaaacagtatccgtagaagagcttctgcaatacgtggagcttcaagatcctgttacgcgcacgcagcttcgcgcaatggctgcgaaaacggtctgcccgccgcataaagtagagcttgaagccttgcttgaaaagcaagcctacaaagaacaagtgctggcaaaacgtttaacaatgcttgaactgcttgaaaaatacccggcgtgtgaaatgaaattcagcgaatttatcgcccttctgccaagcatacgcccgcgctattactcgatttcttcatcacctcgtgtcgatgaaaaacaagcaagcatcacggtcagcgttgtctcaggaccggcgtggagcggatatggagaatataaaggaattgcgtcgaactatcttgccgagctgcaagaaggagatacgattacgtgctttatttccacagatcagtcagaatttacgctgccaaaagaccctgaaacgccgcttatcatggtcggaccgggaacaggcgtcgcgccgtttagaggctttgtgcaggcgcgcaaacagctaaaagaacaaggacagtcacttggagaagcacatttatacttcggctgccgttcacctcatgaagactatctgtatcaagaagagcttgaaaacgcccaaagcgaaggcatcattacgcttcataccgctttttctcgcatgccaaatcagccgaaaacatacgttcagcacgtaatggaacaagacggcaagaaattgattgaacttcttgatcaaggagcgcacttctatatttgcggagacggaagccaaatggcacctgccgttgaagcaacgcttatgaaaagctatgctgacgttcaccaagtgagtgaagcagacgctcgcttatggctgcagcagctagaagaaaaaggccgatacgcaaaagacgtgtgggctggg

SEQ ID NO: 208 - protein, 1049 aa, synthetic construct
  REGION 1..1049: note = Variant of cytochrome P450
MTIKEMPQPKTFGELKNLPLLNTDKPVQALMRIADELGEIFKFEAPGSVTRFLSSQRLIKEACDERRFDKNLSQGLKFARDFLGDGLFTSWTHEPNWKKAHNILGPSFSQRAMKRYHAMMVDIAVQLVQKWERLNADEHIEVSEDMTRLTLDTIGLCGFNYRFNSFYRDQPHPFIVSVVRALDEVMNKLQRANPDDPAYDENKRQCQEAIKVMNDYVDKIIADRKARGEQSHDLLTQMLNGKDPETGEPLDDGNIRYQIITFLIAGHETTSGLLSFALYFLVKNPHVLQKVAEEAARVLVDPVPSYKQVKQLKYVGMVLNEALRLWPTAPAFSLYAKEDTVLGGEYPLIKGDEVMVLIPQLHRDKTIWGDDVEEFRPERFENPSAIPQHAFKPFGNGQRACIGQQFALHEATLVLGMMLKHFDFEDHTNYELVIKEKLTLKPEGFVVKAKSKGIPLGGIPSPSTEQSAKKVRKKAENAHNTPLLVLYGSNAGTAEGTARDLADIAMSKGFAPQVATLDSHAGNLPREGAVLIVTASYNGHPPDNAKQFVDWLDQASADEVKGVRYSVFGCGDKNWAATYQKVPAFIDETLAAKGAENIADRGEADASDDFEGTYEEWSDHMWSDVAAYFNLDIENSEDNKSTLSLQFVDSAADMPLAKMHGAFSTNVVASKELQQPGSARSTRHLEIELPKEASYQEGDHLGVIPRNYEGIVNRVTARFGLSASQQIRLEAEEEKLAHLPLAKTVSVEELLQYVELQDPVTRTQLRAMAAKTVCPPHKVELEALLEKQAYKEQVLAKRLTMLELLEKYPACEMKFSEFIALLPSIRPRYYSISSSPRVDEKQASITVSVVSGPAWSGYGEYKGIASNYLAELQEGDTITCFISTDQSEFTLPKDPETPLIMVGPGTGVAPFRGFVQARKQLKEQGQSLGEAHLYFGCRSPHEDYLYQEELENAQSEGIITLHTAFSRMPNQPKTYVQHVMEQDGKKLIELLDQGAHFYICGDGSQMAPAVEATLMKSYADVHQVSEADARLWLQQLEEKGRYAKDVWAG

SEQ ID NO: 209 - DNA, 3147 bp, synthetic construct
  misc_feature 1..3147: note = Variant of cytochrome P450
  source 1..3147: mol_type = other DNA
atgacaattaaggaaatgcctcagcctaagacgtttggagaacttaaaaatttaccgttattaaacacagataaaccggttcaagctttgatgcgtattgcggatgaattaggagaaatctttaaattcgaggcgcctggtagcgtaacgcgctttttatcaagtcagcgtctaattaaagaagcatgcgatgaacgtcgctttgataaaaacttaagtcaaggccttaaatttgcacgtgattttcttggagacgggttatttacaagctggacgcatgaaccgaattggaaaaaagcgcataatatcttaggcccaagctttagtcagcgtgcaatgaaacgttatcatgcgatgatggtcgatatcgccgtgcagcttgttcaaaagtgggagcgtctaaatgcagatgagcatattgaagtatcggaagacatgacacgtttaacgctggatacaattggtctttgcggcttcaactatcgctttaacagcttttaccgagatcagcctcatccatttattgtgagtgttgtgcgtgcactggatgaagtaatgaacaagctgcagcgagcaaatccagacgacccagcttatgatgaaaacaagcgccagtgtcaagaagatatcaaggtgatgaacgactatgtcgataaaattattgcagatcgcaaagcaaggggtgaacaaagccatgatttattaacgcagatgctaaacggaaaagatccagaaacgggtgagccgcttgatgacgggaacattcgttatcaaattattacattcttaattgcgggacacgaaacaacaagtggtcttttatcatttgcgctgtatttcttagtgaaaaatccacatgtattacaaaaagtagcagaagaagcagcacgagttctagtagatcctgttccaagctacaaacaagtcaaacagcttaaatatgtcggcatggtcttaaacgaagcgctgcgcttatggccaactgctcctgcgttttccctatatgcaaaagaagatacggtgcttggaggagaatatcctttaaccaaaggcgacgaagtaatggttctgattcctcagcttcaccgtgataaaacaatttggggagacgatgtggaggagttccgtccagagcgttttgaaaatccaagtgcgattccgcagcatgcgtttaaaccgtttggaaacggtcagcgtgcgtgtatcggtcagcagttcgctcttcatgaagcaacgctggtacttggtatgatgctaaaacactttgactttgaagatcatacaaactacgagctcgttattaaagaaaagttaacgttaaaacctgaaggctttgtggtaaaagcaaaatcgaaaggcattccgcttggcctgattccttcacctagcactgaacagtctgctaaaaaagtacgcaaaaaggcagaaaacgctcataatacgccgctgcttgtgctatacggttcaaatgcgggaacagctgaaggaacggcgcgtgatttagcagatattgcaatgagcaaaggatttgcaccgcaggtcgcaacgcttgattcacacgccggaaatcttccgcgcgaaggagctgtattaattgtaacggcgtcttataacggtcatccgcctgataacgcaaagcaatttgtcgactggttaggtcaagcgtctgctgatgaagtaaaaggcgttcgctactccgtatttggatgcggcgataaaaactgggctgcgacgtatcaaaaagtgcctgcttttatcgatgaaacgcttgccgctaaaggggcagaaaacatcgctgaccgcggtgaagcagatgcaagcgacgactttgaaggcacatatgaagaatggagtgatcatatgtggagtgacgtagcagcctactttaacctcgacattgaaaacagtgaagataataaatctactctttcacttcaatttgtcgacagcgccgcggatatgccgcttgcgaaaatgcacggtgcgttttcaacgaacgtcgtagcaagcaaagaacttcaacagccaggcagtgcacgaagcacgcgacatcttgaaattgaacttccaaaagaagcttcttatcaagaaggagatcatttaggtgttattcctcgcaactatgaaggaatagtaaaccgtgtaacagcaaggttcggcctaagcgcatcacagcaaatccgtctggaagcagaagaagaaaaattagctcatttgccactcgctaaaacagtatccgtagaagagcttctgcaatacgtggagcttcaagatcctgttacgcgcacgcagcttcgcgcaatggctgctaaaacggtctgcccgccgcataaagtagagcttgaagccttgcttgaaaagcaagcctacaaagaacaagtgctggcaaaacgtttaacaatgcttgaactgcttgaaaaatacccggcgtgtgaaatgaaattcagcgaatttatcgcccttctgccaagcatacgcccgcgctattactcgatttcttcatcacctcgtgtcgatgaaaaacaagcaagcatcacggtcagcgttgtctcaggaccggcgtggagcggatatggagaatataaaggaattgcgtcgaactatcttgccgagctgcaagaaggagatacgattacgtgctttatttccacagaccagtcagagtttacgctgccaaaagaccctgaaacgccgcttatcatggtcggaccgggaacaggcgtcgcgccgtttagaggctttgtgcaggcgcgcaaacagctaaaagaacaaggacagtcacttggacgcgcacatttatacttcggctgccgttcacctcatgaagactatctgtatcaagaagagcttgaaaacgcccaaagcgaaggcatcattacgcttcataccgctttttctcgcatgccaaatcagccgaaaacatacgttcagcacgtaatggaacaagacggcaagaaattgattgaacttcttgatcaaggagcgcacttctatatttgcggagacggaagccaaatggcacctgccgttgaagcaacgcttatgaaaagctatgctgacgttcaccaagtgagtgaagcagacgctcgcttatggctgcagcagctagaagaaaaaggccgatacgcaaaagacgtgtgggctggg

SEQ ID NO: 210 - protein, 1049 aa, synthetic construct
  REGION 1..1049: note = Variant of cytochrome P450
MTIKEMPQPKTFGELKNLPLLNTDKPVQALMRIADELGEIFKFEAPGSVTRFLSSQRLIKEACDERRFDKNLSQGLKFARDFLGDGLFTSWTHEPNWKKAHNILGPSFSQRAMKRYHAMMVDIAVQLVQKWERLNADEHIEVSEDMTRLTLDTIGLCGFNYRFNSFYRDQPHPFIVSVVRALDEVMNKLQRANPDDPAYDENKRQCQEDIKVMNDYVDKIIADRKARGEQSHDLLTQMLNGKDPETGEPLDDGNIRYQIITFLIAGHETTSGLLSFALYFLVKNPHVLQKVAEEAARVLVDPVPSYKQVKQLKYVGMVLNEALRLWPTAPAFSLYAKEDTVLGGEYPLTKGDEVMVLIPQLHRDKTIWGDDVEEFRPERFENPSAIPQHAFKPFGNGQRACIGQQFALHEATLVLGMMLKHFDFEDHTNYELVIKEKLTLKPEGFVVKAKSKGIPLGLIPSPSTEQSAKKVRKKAENAHNTPLLVLYGSNAGTAEGTARDLADIAMSKGFAPQVATLDSHAGNLPREGAVLIVTASYNGHPPDNAKQFVDWLGQASADEVKGVRYSVFGCGDKNWAATYQKVPAFIDETLAAKGAENIADRGEADASDDFEGTYEEWSDHMWSDVAAYFNLDIENSEDNKSTLSLQFVDSAADMPLAKMHGAFSTNVVASKELQQPGSARSTRHLEIELPKEASYQEGDHLGVIPRNYEGIVNRVTARFGLSASQQIRLEAEEEKLAHLPLAKTVSVEELLQYVELQDPVTRTQLRAMAAKTVCPPHKVELEALLEKQAYKEQVLAKRLTMLELLEKYPACEMKFSEFIALLPSIRPRYYSISSSPRVDEKQASITVSVVSGPAWSGYGEYKGIASNYLAELQEGDTITCFISTDQSEFTLPKDPETPLIMVGPGTGVAPFRGFVQARKQLKEQGQSLGRAHLYFGCRSPHEDYLYQEELENAQSEGIITLHTAFSRMPNQPKTYVQHVMEQDGKKLIELLDQGAHFYICGDGSQMAPAVEATLMKSYADVHQVSEADARLWLQQLEEKGRYAKDVWAG

SEQ ID NO: 211 - DNA, 3147 bp, synthetic construct
  misc_feature 1..3147: note = Variant of cytochrome P450
  source 1..3147: mol_type = other DNA
atgacaattaaggaaatgcctcagcctaagacgtttggagaacttaaaaatttaccgttattaaacacagataaaccggttcaagctttgatgcgtattgcggatgaattaggagaaatctttaaattcgaggcgcctggtagcgtaacgcgctttttatcaagtcagcgtctaattaaagaagcatgcgatgaatcacgctttgataaaaacttaagtcaaggcctgaaatttgggcgtgattttctgggagacgggttatttacaagctggacgcatgaaccgaattggaaaaaagcgcataatatcttaggcccaagctttagtcagcgtgcaatgaaacgttatcatgcgatgatggtcgatatcgccgtgcagcttgttcaaaagtgggagcgtctaaatgcagatgagcatattgaagtatcggaagacatgacacgtttaacgctggatacaattggtctttgcggcttcaactatcgctttaacagcttttaccgagatcagcctcatccatttattgtgagtgttgtgcgtgcaggggatgaagtaatgaacaagctgcagcgagcaaatccagacgacccagcttatgatgaaaacaagcgccagtgtcaagaagatatcaaggtgatgaacgactatgtcgataaaattattgcagatcgcaaagcaaggggtgaacaaagccatgatttattaacgcagatgctaaacggaaaagatccagaaacgggtgagccgcttgatgacgggaacattcgttatcaaattattacattcttaattgcgggacacgaaacaacaagtggtcttttatcatttgcgctgtatttcttagtgaaaaatccacatgtattacaaaaagtagcagaagaagcagcacgagttctagtagatcctgttccaagctacaaacaagtcaaacagcttaaatatgtcggcatggtcttaaacgaagcgctgcgcttatggccaactgctcctgcgttttccctatatgcaaaagaagatacggtgcttggaggagaatatcctttaaccaaaggcgacgaagtaatggttctgattcctcagcttcaccgtgataaaacaatttggggagacgatgtggaggagttccgtccagagcgttttgaaaatccaagtgcgattccgcagcatgcgtttaaaccgtttggaaacggtcagcgtgcgtgtatcggtcagcagttcgctcttcatgaagcaacgctggtacttggtatgatgctaaaacactttgactttgaagatcatacaaactacgagctcgttattaaagaaaagttaacgttaaaacctgaaggctttgtggtaaaagcaaaatcgaaaggcattccgcttggcggtattccttcacctagcactgaacagtctgctaaaaaagtacgcaaaaaggcagaaaacgctcataatacgccgctgcttgtgctatacggttcaaatgcgggaacagctgaaggaacggcgcgtgatttagcagatattgcaatgagcaaaggatttgcaccgcaggtcgcaacgcttgattcacacgccggaaatcttccgcgcgaaggagctgtattaattgtaacggcgtcttataacggtcatccgcctgataacgcaaagcaatttgtcgactggttagaccaagcgtctgctgatgaagtaaaaggcgttcgctactccgtatttggatgcggcgataaaaactgggctgcgacgtatcaaaaagtgcctgcttttatcgatgaaacgcttgccgctaaaggggcagaaaacatcgctgaccgcggtgaagcagatgcaagcgacgactttgaaggcacatatgaagaatggagtgatcatatgtggagtgacgtagcagcctactttaacctcgacattgaaaacagtgaagataataaatctactctttcacttcaatttgtcgacagcgccgcggatatgccgcttgcgaaaatgcacggtgcgttttcaacgaacgtcgtagcaagcaaagaacttcaacagccaggcagtgcacgaagcacgcgacatcttgaaattgaacttccaaaagaagcttcttatcaagaaggagatcatttaggtgttattcctcgcaactatgaaggaatagtaaaccgtgtaacagcaaggttcggcctaagcgcatcacagcaaatccgtctggaagcagaagaagaaaaattagctcatttgccactcgctaaaacagtatccgtagaagagcttctgcaatacgtggagcttcaagatcctgttacgcgcacgcagcttcgcgcaatggctgctaaaacggtctgcccgccgcataaagtagagcttgaagccttgcttgaaaagcaagcctacaaagaacaagtgctggcaaaacgtttaacaatgcttgaactgcttgaaaaatacccggcgtgtgaaatgaaattcagcgaatttatcgcccttctgccaagcatacgcccgcgctattactcgatttcttcatcacctcgtgtcgatgaaaaacaagcaagcatcacggtcagcgttgtctcaggaccggcgtggagcggatatggagaatataaaggaattgcgtcgaactatcttgccgagctgcaagaaggagatacgattacgtgctttatttccacagatcagtcagaatttacgctgccaaaagaccctgaaacgccgcttatcatggtcggaccgggaacaggcgtcgcgccgtttagaggctttgtgcaggcgcgcaaacagctaaaagaacaaggacagtcacttggagaagcacatttatacttcggctgccgttcacctcatgaagactatctgtatcaagaagagcttgaaaacgcccaaagcgaaggcatcattacgcttcataccgctttttctcgcatgccaaatcagccgaaaacatacgttcagcacgtaatggaacaagacggcaagaaattgattgaacttcttgatcaaggagcgcacttctatatttgcggagacggaagccaaatggcacctgccgttgaagcaacgcttatgaaaagctatgctgacgttcaccaagtgagtgaagcagacgctcgcttatggctgcagcagctagaagaaaaaggccgatacgcaaaagacgtgtgggctggg

SEQ ID NO: 212 - protein, 1049 aa, synthetic construct
  REGION 1..1049: note = Variant of cytochrome P450
MTIKEMPQPKTFGELKNLPLLNTDKPVQALMRIADELGEIFKFEAPGSVTRFLSSQRLIKEACDESRFDKNLSQGLKFGRDFLGDGLFTSWTHEPNWKKAHNILGPSFSQRAMKRYHAMMVDIAVQLVQKWERLNADEHIEVSEDMTRLTLDTIGLCGFNYRFNSFYRDQPHPFIVSVVRAGDEVMNKLQRANPDDPAYDENKRQCQEDIKVMNDYVDKIIADRKARGEQSHDLLTQMLNGKDPETGEPLDDGNIRYQIITFLIAGHETTSGLLSFALYFLVKNPHVLQKVAEEAARVLVDPVPSYKQVKQLKYVGMVLNEALRLWPTAPAFSLYAKEDTVLGGEYPLTKGDEVMVLIPQLHRDKTIWGDDVEEFRPERFENPSAIPQHAFKPFGNGQRACIGQQFALHEATLVLGMMLKHFDFEDHTNYELVIKEKLTLKPEGFVVKAKSKGIPLGGIPSPSTEQSAKKVRKKAENAHNTPLLVLYGSNAGTAEGTARDLADIAMSKGFAPQVATLDSHAGNLPREGAVLIVTASYNGHPPDNAKQFVDWLDQASADEVKGVRYSVFGCGDKNWAATYQKVPAFIDETLAAKGAENIADRGEADASDDFEGTYEEWSDHMWSDVAAYFNLDIENSEDNKSTLSLQFVDSAADMPLAKMHGAFSTNVVASKELQQPGSARSTRHLEIELPKEASYQEGDHLGVIPRNYEGIVNRVTARFGLSASQQIRLEAEEEKLAHLPLAKTVSVEELLQYVELQDPVTRTQLRAMAAKTVCPPHKVELEALLEKQAYKEQVLAKRLTMLELLEKYPACEMKFSEFIALLPSIRPRYYSISSSPRVDEKQASITVSVVSGPAWSGYGEYKGIASNYLAELQEGDTITCFISTDQSEFTLPKDPETPLIMVGPGTGVAPFRGFVQARKQLKEQGQSLGEAHLYFGCRSPHEDYLYQEELENAQSEGIITLHTAFSRMPNQPKTYVQHVMEQDGKKLIELLDQGAHFYICGDGSQMAPAVEATLMKSYADVHQVSEADARLWLQQLEEKGRYAKDVWAG

SEQ ID NO: 213 - DNA, 3147 bp, synthetic construct
  misc_feature 1..3147: note = Variant of cytochrome P450
  source 1..3147: mol_type = other DNA
atgacaattaaggaaatgcctcagcctaagacgtttggagaacttaaaaatttaccgttattaaacacagataaaccggttcaagctttgatgcgtattgcggatgaattaggagaaatctttaaattcgaggcgcctggtagcgtaacgcgctttttatcaagtcagcgtctaattaaagaagcatgcgatgaatcacgctttgataaaaacttaagtcaaggccttaaatttgcacgtgattttcttggagacgggttatttacaagctggacgcatgaaccgaattggaaaaaagcgcataatatcttaggcccaagctttagtcagcgtgcaatgaaacgttatcatgcgatgatggtcgatatcgccgtgcagcttgttcaaaagtgggagcgtctaaatgcagatgagcatattgaagtatcggaagacatgacacgtttaacgctggatacaattggtctttgcggcttcaactatcgctttaacagcttttaccgagatcagcctcatccatttattgtgagtgtcgtgcgtgcactggatgaagtaatgaacaagctgcagcgagcaaatccagacgacccagcttatgatgaaaacaagcgccagtgtcaagaagccattaaggtgatgaacgactatgtcgataaaattattgcagatcgcaaagcaaggggtgaacaaagccatgatttattaacgcagatgctaaacggaaaagatccagaaacgggtgagccgcttgatgacgggaacattcgttatcaaattattacattcttaattgcgggacacgaaacaacaagtggtcttttatcatttgcgctgtatttcttagtgaaaaatccacatgtattacaaaaagtagcagaagaagcagcacgagttctagtagatcctgttccaagctacaaacaagtcaaacagcttaaatatgtcggcatggtcttaaacgaagcgctgcgcttatggccaactgctcctgcgttttccctatatgcaaaagaagatacggtgcttggaggagaatatcctttaaccaaaggcgacgaagtaatggttctgattcctcagcttcaccgtgataaaacaatttggggagacgatgtggaggagttccgtccagagcgttttgaaaatccaagtgcgattccgcagcatgcgtttaaaccgtttggaaacggtcagcgtgcgtgtatcggtcagcagttcgctcttcatgaagcaacgctggtacttggtatgatgctaaaacactttgactttgaagatcatacaaactacgagctcgttattaaagaaaagttaacgttaaaacctgaaggctttgtggtaaaagcaaaatcgaaaggcattccgcttggcggtattccttcacctagcactgaacagtctgctaaaaaagtacgcaaaaaggcagaaaacgctcataatacgccgctgcttgtgctatacggttcaaatgcgggaacagctgaaggaacggcgcgtgatttagcagatattgcaatgagcaaaggatttgcaccgcaggtcgcaacgcttgattcacacgccggaaatcttccgcgcgaaggagctgtattaattgtaacggcgtcttataacggtcatccgcctgataacgcaaagcaatttgtcgactggttagaccaagcgtctgctgatgaagtaaaaggcgttcgctactccgtatttggatgcggcgataaaaactgggctgcgacgtatcaaaaagtgcctgcttttatcgatgaaacgcttgccgctaaaggggcagaaaacatcgctgaccgcggtgaagcagatgcaagcgacgactttgaaggcacatatgaagaatggagtgatcatatgtggagtgacgtagcagcctactttaacctcgacattgaaaacagtgaagataataaatctactctttcacttcaatttgtcgacagcgccgcggatatgccgcttgcgaaaatgcacggtgcgttttcaacgaacgtcgtagcaagcaaagaacttcaacagccaggcagtgcacgaagcacgcgacatcttgaaattgaacttccaaaagaagcttcttatcaagaaggagatcatttaggtgttattcctcgcaactatgaaggaatagtaaaccgtgtaacagcaaggttcggcctaagcgcatcacagcaaatccgtctggaagcagaagaagaaaaattagctcatttgccactcgctaaaacagtatccgtagaagagcttctgcaatacgtggagcttcaagatcctgttacgcgcacgcagcttcgcgcaatggctgctaaaacggtctgcccgccgcataaagtagagcttgaagccttgcttgaaaagcaagcctacaaagaacaagtgctggcaaaacgtttaacaatgcttgaactgcttgaaaaatacccggcgtgtgaaatgaaattcagcgaatttatcgcccttctgccaagcatacgcccgcgctattactcgatttcttcatcacctcgtgtcgatgaaaaacaagcaagcatcacggtcagcgttgtctcaggaccggcgtggagcggatatggagaatataaaggaattgcgtcgaactatcttgccgagctgcaagaaggagatacgattacgtgctttatttccacagatcagtcagaatttacgctgccaaaagaccctgaaacgccgcttatcatggtcggaccgggaacaggcgtcgcgccgtttagaggctttgtgcaggcgcgcaaacagctaaaagaacaaggacagtcacttggagaagcacatttatacttcggctgccgttcacctcatgaagactatctgtatcaagaagagcttgaaaacgcccaaagcgaaggcatcattacgcttcataccgctttttctcgcatgccaaatcagccgaaaacatacgttcagcacgtaatggaacaagacggcaagaaattgattgaacttcttgatcaaggagcgcacttctatatttgcggagacggaagccaaatggcacctgccgttgaagcaacgcttatgaaaagctatgctgacgttcaccaagtgagtgaagcagacgctcgcttatggctgcagcagctagaagaaaaaggccgatacgcaaaagacgtgtgggctggg

SEQ ID NO: 214 - protein, 1049 aa, synthetic construct
  REGION 1..1049: note = Variant of cytochrome P450
MTIKEMPQPKTFGELKNLPLLNTDKPVQALMRIADELGEIFKFEAPGSVTRFLSSQRLIKEACDESRFDKNLSQGLKFARDFLGDGLFTSWTHEPNWKKAHNILGPSFSQRAMKRYHAMMVDIAVQLVQKWERLNADEHIEVSEDMTRLTLDTIGLCGFNYRFNSFYRDQPHPFIVSVVRALDEVMNKLQRANPDDPAYDENKRQCQEAIKVMNDYVDKIIADRKARGEQSHDLLTQMLNGKDPETGEPLDDGNIRYQIITFLIAGHETTSGLLSFALYFLVKNPHVLQKVAEEAARVLVDPVPSYKQVKQLKYVGMVLNEALRLWPTAPAFSLYAKEDTVLGGEYPLTKGDEVMVLIPQLHRDKTIWGDDVEEFRPERFENPSAIPQHAFKPFGNGQRACIGQQFALHEATLVLGMMLKHFDFEDHTNYELVIKEKLTLKPEGFVVKAKSKGIPLGGIPSPSTEQSAKKVRKKAENAHNTPLLVLYGSNAGTAEGTARDLADIAMSKGFAPQVATLDSHAGNLPREGAVLIVTASYNGHPPDNAKQFVDWLDQASADEVKGVRYSVFGCGDKNWAATYQKVPAFIDETLAAKGAENIADRGEADASDDFEGTYEEWSDHMWSDVAAYFNLDIENSEDNKSTLSLQFVDSAADMPLAKMHGAFSTNVVASKELQQPGSARSTRHLEIELPKEASYQEGDHLGVIPRNYEGIVNRVTARFGLSASQQIRLEAEEEKLAHLPLAKTVSVEELLQYVELQDPVTRTQLRAMAAKTVCPPHKVELEALLEKQAYKEQVLAKRLTMLELLEKYPACEMKFSEFIALLPSIRPRYYSISSSPRVDEKQASITVSVVSGPAWSGYGEYKGIASNYLAELQEGDTITCFISTDQSEFTLPKDPETPLIMVGPGTGVAPFRGFVQARKQLKEQGQSLGEAHLYFGCRSPHEDYLYQEELENAQSEGIITLHTAFSRMPNQPKTYVQHVMEQDGKKLIELLDQGAHFYICGDGSQMAPAVEATLMKSYADVHQVSEADARLWLQQLEEKGRYAKDVWAG

SEQ ID NO: 215 - DNA, 3147 bp, synthetic construct
  misc_feature 1..3147: note = Variant of cytochrome P450
  source 1..3147: mol_type = other DNA
atgacaattaaggaaatgcctcagcctaagacgtttggagaacttaaaaatttaccgttattaaacacagataaaccggttcaagctttgatgcgtattgcggatgaattaggagaaatctttaaattcgaggcgcctggtagcgtaacgcgctttttatcaagtcagcgtctaattaaagaagcatgcgatgaatcacgctttgataaaaacttaagtcaaggcctgaaatttgggcgtgattttctgggagacgggttatttacaagctggacgcatgaaccgaattggaaaaaagcgcataatatcttaggcccaagctttagtcagcgtgcaatgaaacgttatcatgcgatgatggtcgatatcgccgtgcagcttgttcaaaagtgggagcgtctaaatgcagatgagcatattgaagtatcggaagacatgacacgtttaacgctggatacaattggtctttgcggcttcaactatcgctttaacagcttttaccgagatcagcctcatccatttattgtgagtgttgtgcgtgcactggatgaagtaatgaacaagctgcagcgagcaaatccagacgacccagcttatgatgaaaacaagcgccagtgtcaagaagatatcaaggtgatgaacgactatgtcgataaaattattgcagatcgcaaagcaaggggtgaacaaagccatgatttattaacgcagatgctaaacggaaaagatccagaaacgggtgagccgcttgatgacgggaacattcgttatcaaattattacattcttaatcgcgggacacgaaacaacaagtggtcttttatcatttgcgctgtatttcttagtgaaaaatccacatgtattacaaaaagtagcagaagaagcagcacgagttctagtagatcctgttccaagctacaaacaagtcaaacagcttaaatatgtcggcatggtcttaaacgaagcgctgcgcttatggccaactggtcctgcgttttccctatatgcaaaagaagatacggtgcttggaggagaatatcctttaaccaaaggcgacgaagtaatggttctgattcctcagcttcaccgtgataaaacaatttggggagacgatgtggaggagttccgtccagagcgttttgaaaatccaagtgcgattccgcagcatgcgtttaaaccgtttggaaacggtcagcgtgcgtgtatcggtcagcagttcgctcttcatgaagcaacgctggtacttggtatgatgctaaaacactttgactttgaagatcatacaaactacgagctcgttattaaagaaaagttaacgttaaaacctgaaggctttgtggtaaaagcaaaatcgaaaggcattccgcttggcggtattccttcacctagcactgaacagtctgctaaaaaagtacgcaaaaaggcagaaaacgctcataatacgccgctgcttgtgctatacggttcaaatgcgggaacagctgaaggaacggcgcgtgatttagcagatattgcaatgagcaaaggatttgcaccgcaggtcgcaacgcttgattcacacgccggaaatcttccgcgcgaaggagctgtattaattgtaacggcgtcttataacggtcatccgcctgataacgcaaagcaatttgtcgactggttagaccaagcgtctgctgatgaagtaaaaggcgttcgctactccgtatttggatgcggcgataaaaactgggctgcgacgtatcaaaaagtgcctgcttttatcgatgaaacgcttgccgctaaaggggcagaaaacatcgctgaccgcggtgaagcagatgcaagcgacgactttgaaggcacatatgaagaatggagtgatcatatgtggagtgacgtagcagcctactttaacctcgacattgaaaacagtgaagataataaatctactctttcacttcaatttgtcgacagcgccgcggatatgccgcttgcgaaaatgcacggtgcgttttcaacgaacgtcgtagcaagcaaagaacttcaacagccaggcagtgcacgaagcacgcgacatcttgaaattgaacttccaaaagaagcttcttatcaagaaggagatcatttaggtgttattcctcgcaactatgaaggaatagtaaaccgtgtaacagcaaggttcggcctaagcgcatcacagcaaatccgtctggaagcagaagaagaaaaattagctcatttgccactcgctaaaacagtatccgtagaagagcttctgcaatacgtggagcttcaagatcctgttacgcgcacgcagcttcgcgcaatggctgctaaaacggtctgcccgccgcataaagtagagcttgaagccttgcttgaaaagcaagcctacaaagaacaagtgctggcaaaacgtttaacaatgcttgaactgcttgaaaaatacccggcgtgtgaaatgaaattcagcgaatttatcgcccttctgccaagcatacgcccgcgctattactcgatttcttcatcacctcgtgtcgatgaaaaacaagcaagcatcacggtcagcgttgtctcaggaccggcgtggagcggatatggagaatataaaggaattgcgtcgaactatcttgccgagctgcaagaaggagatacgattacgtgctttatttccacagatcagtcagaatttacgctgccaaaagaccctgaaacgccgcttatcatggtcggaccgggaacaggcgtcgcgccgtttagaggctttgtgcaggcgcgcaaacagctaaaagaacaaggacagtcacttggagaagcacatttatacttcggctgccgttcacctcatgaagactatctgtatcaagaagagcttgaaaacgcccaaagcgaaggcatcattacgcttcataccgctttttctcgcatgccaaatcagccgaaaacatacgttcagcacgtaatggaacaagacggcaagaaattgattgaacttcttgatcaaggagcgcacttctatatttgcggagacggaagccaaatggcacctgccgttgaagcaacgcttatgaaaagctatgctgacgttcaccaagtgagtgaagcagacgctcgcttatggctgcagcagctagaagaaaaaggccgatacgcaaaagacgtgtgggctggg

SEQ ID NO: 216 - protein, 1049 aa, synthetic construct
  REGION 1..1049: note = Variant of cytochrome P450
MTIKEMPQPKTFGELKNLPLLNTDKPVQALMRIADELGEIFKFEAPGSVTRFLSSQRLIKEACDESRFDKNLSQGLKFGRDFLGDGLFTSWTHEPNWKKAHNILGPSFSQRAMKRYHAMMVDIAVQLVQKWERLNADEHIEVSEDMTRLTLDTIGLCGFNYRFNSFYRDQPHPFIVSVVRALDEVMNKLQRANPDDPAYDENKRQCQEDIKVMNDYVDKIIADRKARGEQSHDLLTQMLNGKDPETGEPLDDGNIRYQIITFLIAGHETTSGLLSFALYFLVKNPHVLQKVAEEAARVLVDPVPSYKQVKQLKYVGMVLNEALRLWPTGPAFSLYAKEDTVLGGEYPLTKGDEVMVLIPQLHRDKTIWGDDVEEFRPERFENPSAIPQHAFKPFGNGQRACIGQQFALHEATLVLGMMLKHFDFEDHTNYELVIKEKLTLKPEGFVVKAKSKGIPLGGIPSPSTEQSAKKVRKKAENAHNTPLLVLYGSNAGTAEGTARDLADIAMSKGFAPQVATLDSHAGNLPREGAVLIVTASYNGHPPDNAKQFVDWLDQASADEVKGVRYSVFGCGDKNWAATYQKVPAFIDETLAAKGAENIADRGEADASDDFEGTYEEWSDHMWSDVAAYFNLDIENSEDNKSTLSLQFVDSAADMPLAKMHGAFSTNVVASKELQQPGSARSTRHLEIELPKEASYQEGDHLGVIPRNYEGIVNRVTARFGLSASQQIRLEAEEEKLAHLPLAKTVSVEELLQYVELQDPVTRTQLRAMAAKTVCPPHKVELEALLEKQAYKEQVLAKRLTMLELLEKYPACEMKFSEFIALLPSIRPRYYSISSSPRVDEKQASITVSVVSGPAWSGYGEYKGIASNYLAELQEGDTITCFISTDQSEFTLPKDPETPLIMVGPGTGVAPFRGFVQARKQLKEQGQSLGEAHLYFGCRSPHEDYLYQEELENAQSEGIITLHTAFSRMPNQPKTYVQHVMEQDGKKLIELLDQGAHFYICGDGSQMAPAVEATLMKSYADVHQVSEADARLWLQQLEEKGRYAKDVWAG

SEQ ID NO: 217 - DNA, 3147 bp, synthetic construct
  misc_feature 1..3147: note = Variant of cytochrome P450
  source 1..3147: mol_type = other DNA
atgacaattaaggaaatgcctcagcctaagacgtttggagaacttaaaaatttaccgttattaaacacagataaaccggttcaagctttgatgcgtattgcggatgaattaggagaaatctttaaattcgaggcgcctggtagcgtaacgcgctttttatcaagtcagcgtctaattaaagaagcatgcgatgaatcacgctttgataaaaacttaagtcaaggccttaaatttgcacgtgattttcttggagacgggttatttacaagctggacgcatgaaccgaattggaaaaaagcgcataatatcttaggcccaagctttagtcagcgtgcaatgaaacgttatcatgcgatgatggtcgatatcgccgtgcagcttgttcaaaagtgggagcgtctaaatgcagatgagcatattgaagtatcggaagacatgacacgtttaacgctggatacaattggtctttgcggcttcaactatcgctttaacagcttttaccgagatcagcctcatccatttattgtgagtgttgtgcgtgcactggatgaagtaatgaacaagctgcagcgagcaaatccagacgacccagcttatgatgaaaacaagcgccagtgtcaagaagactcgaaggtgctgaacgactatgtcgataaaattattgcagatcgcaaagcaaggggtgaacaaagccatgatttattaacgcagatgctaaacggaaaagatccagaaacgggtgagccgcttgatgacgggaacattcgttatcaaattattacattcttaattgcgggacacgaaacaacaagtggtcttttatcatttgcgctgtatttcttagtgaaaaatccacatgtattacaaaaagtagcagaagaagcagcacgagttctagtagatcctgttccaagctacaaacaagtcaaacagcttaaatatgtcggcatggtcttaaacgaagcgctgcgcttatggccaactgctcctgcgttttccctatatgcaaaagaagatacggtgcttggaggagaatatcctttaaccaaaggcgacgaagtaatggttctgattcctcagcttcaccgtgataaaacaatttggggagacgatgtggaggagttccgtccagagcgttttgaaaatccaagtgcgattccgcagcatgcgtttaaaccgtttggaaacggtcagcgtgcgtgtatcggtcagcagttcgctcttcatgaagcaacgctggtacttggtatgatgctaaaacactttgactttgaagatcatacaaactacgagctcgttattaaagaaaagttaacgttaaaacctgaaggctttgtggtaaaagcaaaatcgaaaggcattccgcttggcggtattccttcacctagcactgaacagtctgctaaaaaagtacgcaaaaaggcagaaaacgctcataatacgccgctgcttgtgctatacggttcaaatgcgggaacagctgaaggaacggcgcgtgatttagcagatattgcaatgagcaaaggatttgcaccgcaggtcgcaacgcttgattcacacgccggaaatcttccgcgcgaaggagctgtattaattgtaacggcgtcttataacggtcatccgcctgataacgcaaagcaatttgtcgactggttagaccaagcgtctgctgatgaagtaaaaggcgttcgctactccgtatttggatgcggcgataaaaactgggctgcgacgtatcaaaaagtgcctgcttttatcgatgaaacgcttgccgctaaaggggcagaaaacatcgctgaccgcggtgaagcagatgcaagcgacgactttgaaggcacatatgaagaatggagtgatcatatgtggagtgacgtagcagcctactttaacctcgacattgaaaacagtgaagataataaatctactctttcacttcaatttgtcgacagcgccgcggatatgccgcttgcgaaaatgcacggtgcgttttcaacgaacgtcgtagcaagcaaagaacttcaacagccaggcagtgcacgaagcacgcgacatcttgaaattgaacttccaaaagaagcttcttatcaagaaggagatcatttaggtgttattcctcgcaactatgaaggaatagtaaaccgtgtaacagcaaggttcggcctaagcgcatcacagcaaatccgtctggaagcagaagaagaaaaattagctcatttgccactcgctaaaacagtatccgtagaagagcttctgcaatacgtggagcttcaagatcctgttacgcgcacgcagcttcgcgcaatggctgctaaaacggtctgcccgccgcataaagtagagcttgaagccttgcttgaaaagcaagcctacaaagaacaagtgctggcaaaacgtttaacaatgcttgaactgcttgaaaaatacccggcgtgtgaaatgaaattcagcgaatttatcgcccttctgccaagcatacgcccgcgctattactcgatttcttcatcacctcgtgtcgatgaaaaacaagcaagcatcacggtcagcgttgtctcaggaccggcgtggagcggatatggagaatataaaggaattgcgtcgaactatcttgccgagctgcaagaaggagatacgattacgtgctttatttccacagatcagtcagaatttacgctgccaaaagaccctgaaacgccgcttatcatggtcggaccgggaacaggcgtcgcgccgtttagaggctttgtgcaggcgcgcaaacagctaaaagaacaaggacagtcacttggagaagcacatttatacttcggctgccgttcacctcatgaagactatctgtatcaagaagagcttgaaaacgcccaaagcgaaggcatcattacgcttcataccgctttttctcgcatgccaaatcagccgaaaacatacgttcagcacgtaatggaacaagacggcaagaaattgattgaacttcttgatcaaggagcgcacttctatatttgcggagacggaagccaaatggcacctgccgttgaagcaacgcttatgaaaagctatgctgacgttcaccaagtgagtgaagcagacgctcgcttatggctgcagcagctagaagaaaaaggccgatacgcaaaagacgtgtgggctggg

SEQ ID NO: 218 - protein, 1049 aa, synthetic construct
  REGION 1..1049: note = Variant of cytochrome P450
MTIKEMPQPKTFGELKNLPLLNTDKPVQALMRIADELGEIFKFEAPGSVTRFLSSQRLIKEACDESRFDKNLSQGLKFARDFLGDGLFTSWTHEPNWKKAHNILGPSFSQRAMKRYHAMMVDIAVQLVQKWERLNADEHIEVSEDMTRLTLDTIGLCGFNYRFNSFYRDQPHPFIVSVVRALDEVMNKLQRANPDDPAYDENKRQCQEDSKVLNDYVDKIIADRKARGEQSHDLLTQMLNGKDPETGEPLDDGNIRYQIITFLIAGHETTSGLLSFALYFLVKNPHVLQKVAEEAARVLVDPVPSYKQVKQLKYVGMVLNEALRLWPTAPAFSLYAKEDTVLGGEYPLTKGDEVMVLIPQLHRDKTIWGDDVEEFRPERFENPSAIPQHAFKPFGNGQRACIGQQFALHEATLVLGMMLKHFDFEDHTNYELVIKEKLTLKPEGFVVKAKSKGIPLGGIPSPSTEQSAKKVRKKAENAHNTPLLVLYGSNAGTAEGTARDLADIAMSKGFAPQVATLDSHAGNLPREGAVLIVTASYNGHPPDNAKQFVDWLDQASADEVKGVRYSVFGCGDKNWAATYQKVPAFIDETLAAKGAENIADRGEADASDDFEGTYEEWSDHMWSDVAAYFNLDIENSEDNKSTLSLQFVDSAADMPLAKMHGAFSTNVVASKELQQPGSARSTRHLEIELPKEASYQEGDHLGVIPRNYEGIVNRVTARFGLSASQQIRLEAEEEKLAHLPLAKTVSVEELLQYVELQDPVTRTQLRAMAAKTVCPPHKVELEALLEKQAYKEQVLAKRLTMLELLEKYPACEMKFSEFIALLPSIRPRYYSISSSPRVDEKQASITVSVVSGPAWSGYGEYKGIASNYLAELQEGDTITCFISTDQSEFTLPKDPETPLIMVGPGTGVAPFRGFVQARKQLKEQGQSLGEAHLYFGCRSPHEDYLYQEELENAQSEGIITLHTAFSRMPNQPKTYVQHVMEQDGKKLIELLDQGAHFYICGDGSQMAPAVEATLMKSYADVHQVSEADARLWLQQLEEKGRYAKDVWAG

SEQ ID NO: 219 - DNA, 3147 bp, synthetic construct
  misc_feature 1..3147: note = Variant of cytochrome P450
  source 1..3147: mol_type = other DNA
atgacaattaaggaaatgcctcagcctaagacgtttggagaacttaaaaatttaccgttattaaacacagataaaccggttcaagctttgatgcgtattgcggatgaattaggagaaatctttaaattcgaggcgcctggtagcgtaacgcgctttttatcaagtcagcgtctaattaaagaagcatgcgatgaatcacgctttgataaaaacttaagtcaaggccttaaatttgcacgtgattttcttggagacgggttatttacaagctggacgcatgaaccgaattggaaaaaagcgcataatatcttaggcccaagctttagtcagcgtgcaatgaaacgttatcatgcgatgatggtcgatatcgccgtgcagcttgttcaaaagtgggagcgtctaaatgcagatgagcatattgaagtatcggaagacatgacacgtttaacgctggatacaattggtctttgcggcttcaactatcgctttaacagcttttaccgagatcagcctcatccatttattgtgagtgttgtgcgtgcactggatgaagtaatgaacaagctgcagcgagcaaatccagacgacccagcttatgatgaaaacaagcgccagtgtcaagaaaacgcgaaggtgatgaacgactatgtcgataaaattattgcagatcgcaaagcaaggggtgaacaaagccatgatttattaacgcagatgctaaacggaaaagatccagaaacgggtgagccgcttgatgacgggaacattcgttatcaaattatcagtttcttaattgcgggacacgaaacaacaagtggtcttttatcatttgcgctgtatttcttagtgaaaaatccacatgtattacaaaaagtagcagaagaagcagcacgagttctagtagatcctgttccaagctacaaacaagtcaaacagcttaaatatgtcggcatggtcttaaacgaagcgctgcgcttatggccaactgctcctgcgttttccctatatgcaaaagaagatacggtgcttggaggagaatatcctttaaccaaaggcgacgaagtaatggttctgattcctcagcttcaccgtgataaaacaatttggggagacgatgtggaggagttccgtccagagcgttttgaaaatccaagtgcgattccgcagcatgcgtttaaaccgtttggaaacggtcagcgtgcgtgtatcggtcagcagttcgctcttcatgaagcaacgctggtacttggtatgatgctaaaacactttgactttgaagatcatacaaactacgagctcgttattaaagaaaagttaacgttaaaacctgaaggctttgtggtaaaagcaaaatcgaaaggcattccgcttggcggtattccttcacctagcactgaacagtctgctaaaaaagtacgcaaaaaggcagaaaacgctcataatacgccgctgcttgtgctatacggttcaaatgcgggaacagctgaaggaacggcgcgtgatttagcagatattgcaatgagcaaaggatttgcaccgcaggtcgcaacgcttgattcacacgccggaaatcttccgcgcgaaggagctgtattaattgtaacggcgtcttataacggtcatccgcctgataacgcaaagcaatttgtcgactggttagaccaagcgtctgctgatgaagtaaaaggcgttcgctactccgtatttggatgcggcgataaaaactgggctgcgacgtatcaaaaagtgcctgcttttatcgatgaaacgcttgccgctaaaggggcagaaaacatcgctgaccgcggtgaagcagatgcaagcgacgactttgaaggcacatatgaagaatggagtgatcatatgtggagtgacgtagcagcctactttaacctcgacattgaaaacagtgaagataataaatctactctttcacttcaatttgtcgacagcgccgcggatatgccgcttgcgaaaatgcacggtgcgttttcaacgaacgtcgtagcaagcaaagaacttcaacagccaggcagtgcacgaagcacgcgacatcttgaaattgaacttccaaaagaagcttcttatcaagaaggagatcatttaggtgttattcctcgcaactatgaaggaatagtaaaccgtgtaacagcaaggttcggcctaagcgcatcacagcaaatccgtctggaagcagaagaagaaaaattagctcatttgccactcgctaaaacagtatccgtagaagagcttctgcaatacgtggagcttcaagatcctgttacgcgcacgcagcttcgcgcaatggctgctaaaacggtctgcccgccgcataaagtagagcttgaagccttgcttgaaaagcaagcctacaaagaacaagtgctggcaaaacgtttaacaatgcttgaactgcttgaaaaatacccggcgtgtgaaatgaaattcagcgaatttatcgcccttctgccaagcatacgcccgcgctattactcgatttcttcatcacctcgtgtcgatgaaaaacaagcaagcatcacggtcagcgttgtctcaggaccggcgtggagcggatatggagaatataaaggaattgcgtcgaactatcttgccgagctgcaagaaggagatacgattacgtgctttatttccacagatcagtcagaatttacgctgccaaaagaccctgaaacgccgcttatcatggtcggaccgggaacaggcgtcgcgccgtttagaggctttgtgcaggcgcgcaaacagctaaaagaacaaggacagtcacttggagaagcacatttatacttcggctgccgttcacctcatgaagactatctgtatcaagaagagcttgaaaacgcccaaagcgaaggcatcattacgcttcataccgctttttctcgcatgccaaatcagccgaaaacatacgttcagcacgtaatggaacaagacggcaagaaattgattgaacttcttgatcaaggagcgcacttctatatttgcggagacggaagccaaatggcacctgccgttgaagcaacgcttatgaaaagctatgctgacgttcaccaagtgagtgaagcagacgctcgcttatggctgcagcagctagaagaaaaaggccgatacgcaaaagacgtgtgggctggg

SEQ ID NO: 220 - protein, 1049 aa, synthetic construct
  REGION 1..1049: note = Variant of cytochrome P450
MTIKEMPQPKTFGELKNLPLLNTDKPVQALMRIADELGEIFKFEAPGSVTRFLSSQRLIKEACDESRFDKNLSQGLKFARDFLGDGLFTSWTHEPNWKKAHNILGPSFSQRAMKRYHAMMVDIAVQLVQKWERLNADEHIEVSEDMTRLTLDTIGLCGFNYRFNSFYRDQPHPFIVSVVRALDEVMNKLQRANPDDPAYDENKRQCQENAKVMNDYVDKIIADRKARGEQSHDLLTQMLNGKDPETGEPLDDGNIRYQIISFLIAGHETTSGLLSFALYFLVKNPHVLQKVAEEAARVLVDPVPSYKQVKQLKYVGMVLNEALRLWPTAPAFSLYAKEDTVLGGEYPLTKGDEVMVLIPQLHRDKTIWGDDVEEFRPERFENPSAIPQHAFKPFGNGQRACIGQQFALHEATLVLGMMLKHFDFEDHTNYELVIKEKLTLKPEGFVVKAKSKGIPLGGIPSPSTEQSAKKVRKKAENAHNTPLLVLYGSNAGTAEGTARDLADIAMSKGFAPQVATLDSHAGNLPREGAVLIVTASYNGHPPDNAKQFVDWLDQASADEVKGVRYSVFGCGDKNWAATYQKVPAFIDETLAAKGAENIADRGEADASDDFEGTYEEWSDHMWSDVAAYFNLDIENSEDNKSTLSLQFVDSAADMPLAKMHGAFSTNVVASKELQQPGSARSTRHLEIELPKEASYQEGDHLGVIPRNYEGIVNRVTARFGLSASQQIRLEAEEEKLAHLPLAKTVSVEELLQYVELQDPVTRTQLRAMAAKTVCPPHKVELEALLEKQAYKEQVLAKRLTMLELLEKYPACEMKFSEFIALLPSIRPRYYSISSSPRVDEKQASITVSVVSGPAWSGYGEYKGIASNYLAELQEGDTITCFISTDQSEFTLPKDPETPLIMVGPGTGVAPFRGFVQARKQLKEQGQSLGEAHLYFGCRSPHEDYLYQEELENAQSEGIITLHTAFSRMPNQPKTYVQHVMEQDGKKLIELLDQGAHFYICGDGSQMAPAVEATLMKSYADVHQVSEADARLWLQQLEEKGRYAKDVWAG

SEQ ID NO: 221 - DNA, 3147 bp, synthetic construct
  misc_feature 1..3147: note = Variant of cytochrome P450
  source 1..3147: mol_type = other DNA
atgacaattaaggaaatgcctcagcctaagacgtttggagaacttaaaaatttaccgttattaaacacagataaaccggttcaagctttgatgcgtattgcggatgaattaggagaaatctttaaattcgaggcgcctggtagcgtaacgcgctttttatcaagtcagcgtctaattaaagaagcatgcgatgaatcacgctttgataaaaacttaagtcaaggcctgaaatttgcgcgtgattttctgggagacgggttatttacaagctggacgcatgaaccgaattggaaaaaagcgcataatatcttaggcccaagctttagtcagcgtgcaatgaaacgttatcatgcgatgatggtcgatatcgccgtgcagcttgttcaaaagtgggagcgtctaaatgcagatgagcatattgaagtatcggaagacatgacacgtttaacgctggatacaattggtctttgcggcttcaactatcgctttaacagcttttaccgagatcagcctcatccatttattgtgagtgttgtgcgtgcactggatgaagtaatgaacaagctgcagcgagcaaatccagacgacccagcttatgatgaaaacaagcgccagtgtcaagaagatatcaaggtgatgaacgactatgtcgataaaattattgcagatcgcaaagcaaggggtgaacaaagccatgatttattaacgcagatgctaaacggaaaagatccagaaacgggtgagccgcttgatgacgggaacattcgttatcaaattattacattcttaattgcgggacacgaaacaacaagtggtcttttatcatttgcgctgtatttcttagtgaaaaatccacatgtattacaaaaagtagcagaagaagcagcacgagttctagtagatcctgttccaagctacaaacaagtcaaacagcttaaatatgtcggcatggtcttaaacgaagcgctgcgcttatggccaactggtcctgcgttttccctatatgcaaaagaagatacggtgcttggaggagaatatcctttaaccaaaggcgacgaagtaatggttctgattcctcagcttcaccgtgataaaacaatttggggagacgatgtggaggagttccgtccagagcgttttgaaaatccaagtgcgattccgcagcatgcgtttaaaccgtttggaaacggtcagcgtgcgtgtatcggtcagcagttcgctcttcatgaagcaacgctggtacttggtatgatgctaaaacactttgactttgaagatcatacaaactacgagctcgttattaaagaaaagttaacgttaaaacctgaaggctttgtggtaaaagcaaaatcgaaaggcattccgcttggcggtattccttcacctagcactgaacagtctgctaaaaaagtacgcaaaaaggcagaaaacgctcataatacgccgctgcttgtgctatacggttcaaatgcgggaacagctgaaggaacggcgcgtgatttagcagatattgcaatgagcaaaggatttgcaccgcaggtcgcaacgcttgattcacacgccggaaatcttccgcgcgaaggagctgtattaattgtaacggcgtcttataacggtcatccgcctgataacgcaaagcaatttgtcgactggttagaccaagcgtctgctgatgaagtaaaaggcgttcgctactccgtatttggatgcggcgataaaaactgggctgcgacgtatcaaaaagtgcctgcttttatcgatgaaacgcttgccgctaaaggggcagaaaacatcgctgaccgcggtgaagcagatgcaagcgacgactttgaaggcacatatgaagaatggagtgatcatatgtggagtgacgtagcagcctactttaacctcgacattgaaaacagtgaagataataaatctactctttcacttcaatttgtcgacagcgccgcggatatgccgcttgcgaaaatgcacggtgcgttttcaacgaacgtcgtagcaagcaaagaacttcaacagccaggcagtgcacgaagcacgcgacatcttgaaattgaacttccaaaagaagcttcttatcaagaaggagatcatttaggtgttattcctcgcaactatgaaggaatagtaaaccgtgtaacagcaaggttcggcctaagcgcatcacagcaaatccgtctggaagcagaagaagaaaaattagctcatttgccactcgctaaaacagtatccgtagaagagcttctgcaatacgtggagcttcaagatcctgttacgcgcacgcagcttcgcgcaatggctgctaaaacggtctgcccgccgcataaagtagagcttgaagccttgcttgaaaagcaagcctacaaagaacaagtgctggcaaaacgtttaacaatgcttgaactgcttgaaaaatacccggcgtgtgaaatgaaattcagcgaatttatcgcccttctgccaagcatacgcccgcgctattactcgatttcttcatcacctcgtgtcgatgaaaaacaagcaagcatcacggtcagcgttgtctcaggaccggcgtggagcggatatggagaatataaaggaattgcgtcgaactatcttgccgagctgcaagaaggagatacgattacgtgctttatttccacagatcagtcagaatttacgctgccaaaagaccctgaaacgccgcttatcatggtcggaccgggaacaggcgtcgcgccgtttagaggctttgtgcaggcgcgcaaacagctaaaagaacaaggacagtcacttggagaagcacatttatacttcggctgccgttcacctcatgaagactatctgtatcaagaagagcttgaaaacgcccaaagcgaaggcatcattacgcttcataccgctttttctcgcatgccaaatcagccgaaaacatacgttcagcacgtaatggaacaagacggcaagaaattgattgaacttcttgatcaaggagcgcacttctatatttgcggagacggaagccaaatggcacctgccgttgaagcaacgcttatgaaaagctatgctgacgttcaccaagtgagtgaagcagacgctcgcttatggctgcagcagctagaagaaaaaggccgatacgcaaaagacgtgtgggctggg

SEQ ID NO: 222 - protein, 1049 aa, synthetic construct
  REGION 1..1049: note = Variant of cytochrome P450
MTIKEMPQPKTFGELKNLPLLNTDKPVQALMRIADELGEIFKFEAPGSVTRFLSSQRLIKEACDESRFDKNLSQGLKFARDFLGDGLFTSWTHEPNWKKAHNILGPSFSQRAMKRYHAMMVDIAVQLVQKWERLNADEHIEVSEDMTRLTLDTIGLCGFNYRFNSFYRDQPHPFIVSVVRALDEVMNKLQRANPDDPAYDENKRQCQEDIKVMNDYVDKIIADRKARGEQSHDLLTQMLNGKDPETGEPLDDGNIRYQIITFLIAGHETTSGLLSFALYFLVKNPHVLQKVAEEAARVLVDPVPSYKQVKQLKYVGMVLNEALRLWPTGPAFSLYAKEDTVLGGEYPLTKGDEVMVLIPQLHRDKTIWGDDVEEFRPERFENPSAIPQHAFKPFGNGQRACIGQQFALHEATLVLGMMLKHFDFEDHTNYELVIKEKLTLKPEGFVVKAKSKGIPLGGIPSPSTEQSAKKVRKKAENAHNTPLLVLYGSNAGTAEGTARDLADIAMSKGFAPQVATLDSHAGNLPREGAVLIVTASYNGHPPDNAKQFVDWLDQASADEVKGVRYSVFGCGDKNWAATYQKVPAFIDETLAAKGAENIADRGEADASDDFEGTYEEWSDHMWSDVAAYFNLDIENSEDNKSTLSLQFVDSAADMPLAKMHGAFSTNVVASKELQQPGSARSTRHLEIELPKEASYQEGDHLGVIPRNYEGIVNRVTARFGLSASQQIRLEAEEEKLAHLPLAKTVSVEELLQYVELQDPVTRTQLRAMAAKTVCPPHKVELEALLEKQAYKEQVLAKRLTMLELLEKYPACEMKFSEFIALLPSIRPRYYSISSSPRVDEKQASITVSVVSGPAWSGYGEYKGIASNYLAELQEGDTITCFISTDQSEFTLPKDPETPLIMVGPGTGVAPFRGFVQARKQLKEQGQSLGEAHLYFGCRSPHEDYLYQEELENAQSEGIITLHTAFSRMPNQPKTYVQHVMEQDGKKLIELLDQGAHFYICGDGSQMAPAVEATLMKSYADVHQVSEADARLWLQQLEEKGRYAKDVWAG

SEQ ID NO: 223 - DNA, 3147 bp, synthetic construct
  misc_feature 1..3147: note = Variant of cytochrome P450
  source 1..3147: mol_type = other DNA
atgacaattaaggaaatgcctcagcctaagacgtttggagaacttaaaaatttaccgttattaaacacagataaaccggttcaagctttgatgcgtattgcggatgaattaggagaaatctttaaattcgaggcgcctggtagcgtaacgcgctttttatcaagtcagcgtctaattaaagaagcatgcgatgaatcacgctttgataaaaacttaagtcaaggcgttaaatttgcgcgtgattttgctggagacgggttatttacaagctggacgcatgaaccgaattggaaaaaagcgcataatatcttaggcccaagctttagtcagcgtgcaatgaaacgttatcatgcgatgatggtcgatatcgccgtgcagcttgttcaaaagtgggagcgtctaaatgcagatgagcatattgaagtatcggaagacatgacacgtttaacgctggatacaattggtctttgcggcttcaactatcgctttaacagcttttaccgagatcagcctcatccatttattgtgagtgttgtgcgtgcactggatgaagtaatgaacaagctgcagcgagcaaatccagacgacccagcttatgatgaaaacaagcgccagtgtcaagaagatatcaaggtgatgaacgactatgtcgataaaattattgcagatcgcaaagcaaggggtgaacaaagccatgatttattaacgcagatgctaaacggaaaagatccagaaacgggtgagccgcttgatgacgggaacattcgttatcaaattattacattcttaattgcgggacacgaaacaacaagtggtcttttatcatttgcgctgtatttcttagtgaaaaatccacatgtattacaaaaagtagcagaagaagcagcacgagttctagtagatcctgttccaagctacaaacaagtcaaacagcttaaatatgtcggcatggtcttaaacgaagcgctgcgcttatggccaactggtcctgcgttttccctatatgcaaaagaagatacggtgcttggaggagaatatcctttaaccaaaggcgacgaagtaatggttctgattcctcagcttcaccgtgataaaacaatttggggagacgatgtggaggagttccgtccagagcgttttgaaaatccaagtgcgattccgcagcatgcgtttaaaccgtttggaaacggtcagcgtgcgtgtatcggtcagcagttcgctcttcatgaagcaacgctggtacttggtatgatgctaaaacactttgactttgaagatcatacaaactacgagctcgttattaaagaaaagttaacgttaaaacctgaaggctttgtggtaaaagcaaaatcgaaaggcattccgcttggcggtattccttcacctagcactgaacagtctgctaaaaaagtacgcaaaaaggcagaaaacgctcataatacgccgctgcttgtgctatacggttcaaatgcgggaacagctgaaggaacggcgcgtgatttagcagatattgcaatgagcaaaggatttgcaccgcaggtcgcaacgcttgattcacacgccggaaatcttccgcgcgaaggagctgtattaattgtaacggcgtcttataacggtcatccgcctgataacgcaaagcaatttgtcgactggttagaccaagcgtctgctgatgaagtaaaaggcgttcgctactccgtatttggatgcggcgataaaaactgggctgcgacgtatcaaaaagtgcctgcttttatcgatgaaacgcttgccgctaaaggggcagaaaacatcgctgaccgcggtgaagcagatgcaagcgacgactttgaaggcacatatgaagaatggagtgatcatatgtggagtgacgtagcagcctactttaacctcgacattgaaaacagtgaagataataaatctactctttcacttcaatttgtcgacagcgccgcggatatgccgcttgcgaaaatgcacggtgcgttttcaacgaacgtcgtagcaagcaaagaacttcaacagccaggcagtgcacgaagcacgcgacatcttgaaattgaacttccaaaagaagcttcttatcaagaaggagatcatttaggtgttattcctcgcaactatgaaggaatagtaaaccgtgtaacagcaaggttcggcctaagcgcatcacagcaaatccgtctggaagcagaagaagaaaaattagctcatttgccactcgctaaaacagtatccgtagaagagcttctgcaatacgtggagcttcaagatcctgttacgcgcacgcagcttcgcgcaatggctgctaaaacggtctgcccgccgcataaagtagagcttgaagccttgcttgaaaagcaagcctacaaagaacaagtgctggcaaaacgtttaacaatgcttgaactgcttgaaaaatacccggcgtgtgaaatgaaattcagcgaatttatcgcccttctgccaagcatacgcccgcgctattactcgatttcttcatcacctcgtgtcgatgaaaaacaagcaagcatcacggtcagcgttgtctcaggaccggcgtggagcggatatggagaatataaaggaattgcgtcgaactatcttgccgagctgcaagaaggagatacgattacgtgctttatttccacagatcagtcagaatttacgctgccaaaagaccctgaaacgccgcttatcatggtcggaccgggaacaggcgtcgcgccgtttagaggctttgtgcaggcgcgcaaacagctaaaagaacaaggacagtcacttggagaagcacatttatacttcggctgccgttcacctcatgaagactatctgtatcaagaagagcttgaaaacgcccaaagcgaaggcatcattacgcttcataccgctttttctcgcatgccaaatcagccgaaaacatacgttcagcacgtaatggaacaagacggcaagaaattgattgaacttcttgatcaaggagcgcacttctatatttgcggagacggaagccaaatggcacctgccgttgaagcaacgcttatgaaaagctatgctgacgttcaccaagtgagtgaagcagacgctcgcttatggctgcagcagctagaagaaaaaggccgatacgcaaaagacgtgtgggctggg

SEQ ID NO: 224 - protein, 1049 aa, synthetic construct
  REGION 1..1049: note = Variant of cytochrome P450
MTIKEMPQPKTFGELKNLPLLNTDKPVQALMRIADELGEIFKFEAPGSVTRFLSSQRLIKEACDESRFDKNLSQGVKFARDFAGDGLFTSWTHEPNWKKAHNILGPSFSQRAMKRYHAMMVDIAVQLVQKWERLNADEHIEVSEDMTRLTLDTIGLCGFNYRFNSFYRDQPHPFIVSVVRALDEVMNKLQRANPDDPAYDENKRQCQEDIKVMNDYVDKIIADRKARGEQSHDLLTQMLNGKDPETGEPLDDGNIRYQIITFLIAGHETTSGLLSFALYFLVKNPHVLQKVAEEAARVLVDPVPSYKQVKQLKYVGMVLNEALRLWPTGPAFSLYAKEDTVLGGEYPLTKGDEVMVLIPQLHRDKTIWGDDVEEFRPERFENPSAIPQHAFKPFGNGQRACIGQQFALHEATLVLGMMLKHFDFEDHTNYELVIKEKLTLKPEGFVVKAKSKGIPLGGIPSPSTEQSAKKVRKKAENAHNTPLLVLYGSNAGTAEGTARDLADIAMSKGFAPQVATLDSHAGNLPREGAVLIVTASYNGHPPDNAKQFVDWLDQASADEVKGVRYSVFGCGDKNWAATYQKVPAFIDETLAAKGAENIADRGEADASDDFEGTYEEWSDHMWSDVAAYFNLDIENSEDNKSTLSLQFVDSAADMPLAKMHGAFSTNVVASKELQQPGSARSTRHLEIELPKEASYQEGDHLGVIPRNYEGIVNRVTARFGLSASQQIRLEAEEEKLAHLPLAKTVSVEELLQYVELQDPVTRTQLRAMAAKTVCPPHKVELEALLEKQAYKEQVLAKRLTMLELLEKYPACEMKFSEFIALLPSIRPRYYSISSSPRVDEKQASITVSVVSGPAWSGYGEYKGIASNYLAELQEGDTITCFISTDQSEFTLPKDPETPLIMVGPGTGVAPFRGFVQARKQLKEQGQSLGEAHLYFGCRSPHEDYLYQEELENAQSEGIITLHTAFSRMPNQPKTYVQHVMEQDGKKLIELLDQGAHFYICGDGSQMAPAVEATLMKSYADVHQVSEADARLWLQQLEEKGRYAKDVWAG

SEQ ID NO: 225 - DNA, 3147 bp, synthetic construct
  misc_feature 1..3147: note = Variant of cytochrome P450
  source 1..3147: mol_type = other DNA
atgacaattaaggaaatgcctcagcctaagacgtttggagaacttaaaaatttaccgttattaaacacagataaaccggttcaagctttgatgcgtattgcggatgaattaggagaaatctttaaattcgaggcgcctggtagcgtaacgcgctttttatcaagtcagcgtctaattaaagaagcatgcgatgaatcacgctttgataaaaacttaagtcaaggccttaaatttgcacgtgattttcttggagacgggttatttacaagctggacgcatgaaccgaattggaaaaaagcgcataatatcttaggcccaagctttagtcagcgtgcaatgaaacgttatcatgcgatgatggtcgatatcgccgtgcagcttgttcaaaagtgggagcgtctaaatgcagatgagcatattgaagtatcggaagacatgacacgtttaacgctggatacaattggtctttgcggcttcaactatcgctttaacagcttttaccgagatcagcctcatccatttattgtgagtgccgtgcgtgcactggatgaagtaatgaacaagctgcagcgagcaaatccagacgacccagcttatgatgaaaacaagcgccagtgtcaagaagcctcgaaggtgatcaacgactatgtcgataaaattattgcagatcgcaaagcaaggggtgaacaaagccatgatttattaacgcagatgctaaacggaaaagatccagaaacgggtgagccgcttgatgacgggaacattcgttatcaaattattacattcttaattgcgggacacgaaacaacaagtggtcttttatcatttgcgctgtatttcttagtgaaaaatccacatgtattacaaaaagtagcagaagaagcagcacgagttctagtagatcctgttccaagctacaaacaagtcaaacagcttaaatatgtcggcatggtcttaaacgaagcgctgcgcttatggccaactgctcctgcgttttccctatatgcaaaagaagatacggtgcttggaggagaatatcctttaaccaaaggcgacgaagtaatggttctgattcctcagcttcaccgtgataaaacaatttggggagacgatgtggaggagttccgtccagagcgttttgaaaatccaagtgcgattccgcagcatgcgtttaaaccgtttggaaacggtcagcgtgcgtgtatcggtcagcagttcgctcttcatgaagcaacgctggtacttggtatgatgctaaaacactttgactttgaagatcatacaaactacgagctcgttattaaagaaaagttaacgttaaaacctgaaggctttgtggtaaaagcaaaatcgaaaggcattccgcttggcggtattccttcacctagcactgaacagtctgctaaaaaagtacgcaaaaaggcagaaaacgctcataatacgccgctgcttgtgctatacggttcaaatgcgggaacagctgaaggaacggcgcgtgatttagcagatattgcaatgagcaaaggatttgcaccgcaggtcgcaacgcttgattcacacgccggaaatcttccgcgcgaaggagctgtattaattgtaacggcgtcttataacggtcatccgcctgataacgcaaagcaatttgtcgactggttagaccaagcgtctgctgatgaagtaaaaggcgttcgctactccgtatttggatgcggcgataaaaactgggctgcgacgtatcaaaaagtgcctgcttttatcgatgaaacgcttgccgctaaaggggcagaaaacatcgctgaccgcggtgaagcagatgcaagcgacgactttgaaggcacatatgaagaatggagtgatcatatgtggagtgacgtagcagcctactttaacctcgacattgaaaacagtgaagataataaatctactctttcacttcaatttgtcgacagcgccgcggatatgccgcttgcgaaaatgcacggtgcgttttcaacgaacgtcgtagcaagcaaagaacttcaacagccaggcagtgcacgaagcacgcgacatcttgaaattgaacttccaaaagaagcttcttatcaagaaggagatcatttaggtgttattcctcgcaactatgaaggaatagtaaaccgtgtaacagcaaggttcggcctaagcgcatcacagcaaatccgtctggaagcagaagaagaaaaattagctcatttgccactcgctaaaacagtatccgtagaagagcttctgcaatacgtggagcttcaagatcctgttacgcgcacgcagcttcgcgcaatggctgctaaaacggtctgcccgccgcataaagtagagcttgaagccttgcttgaaaagcaagcctacaaagaacaagtgctggcaaaacgtttaacaatgcttgaactgcttgaaaaatacccggcgtgtgaaatgaaattcagcgaatttatcgcccttctgccaagcatacgcccgcgctattactcgatttcttcatcacctcgtgtcgatgaaaaacaagcaagcatcacggtcagcgttgtctcaggaccggcgtggagcggatatggagaatataaaggaattgcgtcgaactatcttgccgagctgcaagaaggagatacgattacgtgctttatttccacagatcagtcagaatttacgctgccaaaagaccctgaaacgccgcttatcatggtcggaccgggaacaggcgtcgcgccgtttagaggctttgtgcaggcgcgcaaacagctaaaagaacaaggacagtcacttggagaagcacatttatacttcggctgccgttcacctcatgaagactatctgtatcaagaagagcttgaaaacgcccaaagcgaaggcatcattacgcttcataccgctttttctcgcatgccaaatcagccgaaaacatacgttcagcacgtaatggaacaagacggcaagaaattgattgaacttcttgatcaaggagcgcacttctatatttgcggagacggaagccaaatggcacctgccgttgaagcaacgcttatgaaaagctatgctgacgttcaccaagtgagtgaagcagacgctcgcttatggctgcagcagctagaagaaaaaggccgatacgcaaaagacgtgtgggctggg

SEQ ID NO: 226 - protein, 1049 aa, synthetic construct
  REGION 1..1049: note = Variant of cytochrome P450
MTIKEMPQPKTFGELKNLPLLNTDKPVQALMRIADELGEIFKFEAPGSVTRFLSSQRLIKEACDESRFDKNLSQGLKFARDFLGDGLFTSWTHEPNWKKAHNILGPSFSQRAMKRYHAMMVDIAVQLVQKWERLNADEHIEVSEDMTRLTLDTIGLCGFNYRFNSFYRDQPHPFIVSAVRALDEVMNKLQRANPDDPAYDENKRQCQEASKVINDYVDKIIADRKARGEQSHDLLTQMLNGKDPETGEPLDDGNIRYQIITFLIAGHETTSGLLSFALYFLVKNPHVLQKVAEEAARVLVDPVPSYKQVKQLKYVGMVLNEALRLWPTAPAFSLYAKEDTVLGGEYPLTKGDEVMVLIPQLHRDKTIWGDDVEEFRPERFENPSAIPQHAFKPFGNGQRACIGQQFALHEATLVLGMMLKHFDFEDHTNYELVIKEKLTLKPEGFVVKAKSKGIPLGGIPSPSTEQSAKKVRKKAENAHNTPLLVLYGSNAGTAEGTARDLADIAMSKGFAPQVATLDSHAGNLPREGAVLIVTASYNGHPPDNAKQFVDWLDQASADEVKGVRYSVFGCGDKNWAATYQKVPAFIDETLAAKGAENIADRGEADASDDFEGTYEEWSDHMWSDVAAYFNLDIENSEDNKSTLSLQFVDSAADMPLAKMHGAFSTNVVASKELQQPGSARSTRHLEIELPKEASYQEGDHLGVIPRNYEGIVNRVTARFGLSASQQIRLEAEEEKLAHLPLAKTVSVEELLQYVELQDPVTRTQLRAMAAKTVCPPHKVELEALLEKQAYKEQVLAKRLTMLELLEKYPACEMKFSEFIALLPSIRPRYYSISSSPRVDEKQASITVSVVSGPAWSGYGEYKGIASNYLAELQEGDTITCFISTDQSEFTLPKDPETPLIMVGPGTGVAPFRGFVQARKQLKEQGQSLGEAHLYFGCRSPHEDYLYQEELENAQSEGIITLHTAFSRMPNQPKTYVQHVMEQDGKKLIELLDQGAHFYICGDGSQMAPAVEATLMKSYADVHQVSEADARLWLQQLEEKGRYAKDVWAG

SEQ ID NO: 227 - DNA, 3147 bp, synthetic construct
  misc_feature 1..3147: note = Variant of cytochrome P450
  source 1..3147: mol_type = other DNA
atgacaattaaggaaatgcctcagcctaagacgtttggagaacttaaaaatttaccgttattaaacacagataaaccggttcaagctttgatgcgtattgcggatgaattaggagaaatctttaaattcgaggcgcctggtagcgtaacgcgctttttatcaagtcagcgtctaattaaagaagcatgcgatgaatcacgctttgataaaaacttaagtcaaggcctgaaatttgcgcgtgattttctgggagacgggttatttacaagctggacgcatgaaccgaattggaaaaaagcgcataatatcttaggcccaagctttagtcagcgtgcaatgaaacgttatcatgcgatgatggtcgatatcgccgtgcagcttgttcaaaagtgggagcgtctaaatgcagatgagcatattgaagtatcggaagacatgacacgtttaacgctggatacaattggtctttgcggcttcaactatcgctttaacagcttttaccgagatcagcctcatccatttattgtgagtgttgtgcgtgcactggatgaagtaatgaacaagctgcagcgagcaaatccagacgacccagcttatgatgaaaacaagcgccagtgtcaagaagatatcaaggtgatgaacgactatgtcgataaaattattgcagatcgcaaagcaaggggtgaacaaagccatgatttattaacgcagatgctaaacggaaaagatccagaaacgggtgagccgcttgatgacgggaacattcgttatcaaattattacattcttaatcgcgggacacgaaacaacaagtggtcttttatcatttgcgctgtatttcttagtgaaaaatccacatgtattacaaaaagtagcagaagaagcagcacgagttctagtagatcctgttccaagctacaaacaagtcaaacagcttaaatatgtcggcatggtcttaaacgaagcgctgcgcttatggccaactggtcctgcgttttccctatatgcaaaagaagatacggtgcttggaggagaatatcctttaaccaaaggcgacgaagtaatggttctgattcctcagcttcaccgtgataaaacaatttggggagacgatgtggaggagttccgtccagagcgttttgaaaatccaagtgcgattccgcagcatgcgtttaaaccgtttggaaacggtcagcgtgcgtgtatcggtcagcagttcgctcttcatgaagcaacgctggtacttggtatgatgctaaaacactttgactttgaagatcatacaaactacgagctcgttattaaagaaaagctggcgttaaaacctgaaggctttgtggtaaaagcaaaatcgaaaggcattccgcttggcggtattccttcacctagcactgaacagtctgctaaaaaagtacgcaaaaaggcagaaaacgctcataatacgccgctgcttgtgctatacggttcaaatgcgggaacagctgaaggaacggcgcgtgatttagcagatattgcaatgagcaaaggatttgcaccgcaggtcgcaacgcttgattcacacgccggaaatcttccgcgcgaaggagctgtattaattgtaacggcgtcttataacggtcatccgcctgataacgcaaagcaatttgtcgactggttagaccaagcgtctgctgatgaagtaaaaggcgttcgctactccgtatttggatgcggcgataaaaactgggctgcgacgtatcaaaaagtgcctgcttttatcgatgaaacgcttgccgctaaaggggcagaaaacatcgctgaccgcggtgaagcagatgcaagcgacgactttgaaggcacatatgaagaatggagtgatcatatgtggagtgacgtagcagcctactttaacctcgacattgaaaacagtgaagataataaatctactctttcacttcaatttgtcgacagcgccgcggatatgccgcttgcgaaaatgcacggtgcgttttcaacgaacgtcgtagcaagcaaagaacttcaacagccaggcagtgcacgaagcacgcgacatcttgaaattgaacttccaaaagaagcttcttatcaagaaggagatcatttaggtgttattcctcgcaactatgaaggaatagtaaaccgtgtaacagcaaggttcggcctaagcgcatcacagcaaatccgtctggaagcagaagaagaaaaattagctcatttgccactcgctaaaacagtatccgtagaagagcttctgcaatacgtggagcttcaagatcctgttacgcgcacgcagcttcgcgcaatggctgctaaaacggtctgcccgccgcataaagtagagcttgaagccttgcttgaaaagcaagcctacaaagaacaagtgctggcaaaacgtttaacaatgcttgaactgcttgaaaaatacccggcgtgtgaaatgaaattcagcgaatttatcgcccttctgccaagcatacgcccgcgctattactcgatttcttcatcacctcgtgtcgatgaaaaacaagcaagcatcacggtcagcgttgtctcaggaccggcgtggagcggatatggagaatataaaggaattgcgtcgaactatcttgccgagctgcaagaaggagatacgattacgtgctttatttccacagatcagtcagaatttacgctgccaaaagaccctgaaacgccgcttatcatggtcggaccgggaacaggcgtcgcgccgtttagaggctttgtgcaggcgcgcaaacagctaaaagaacaaggacagtcacttggagaagcacatttatacttcggctgccgttcacctcatgaagactatctgtatcaagaagagcttgaaaacgcccaaagcgaaggcatcattacgcttcataccgctttttctcgcatgccaaatcagccgaaaacatacgttcagcacgtaatggaacaagacggcaagaaattgattgaacttcttgatcaaggagcgcacttctatatttgcggagacggaagccaaatggcacctgccgttgaagcaacgcttatgaaaagctatgctgacgttcaccaagtgagtgaagcagacgctcgcttatggctgcagcagctagaagaaaaaggccgatacgcaaaagacgtgtgggctggg

SEQ ID NO: 228 - protein, 1049 aa, synthetic construct
  REGION 1..1049: note = Variant of cytochrome P450
MTIKEMPQPKTFGELKNLPLLNTDKPVQALMRIADELGEIFKFEAPGSVTRFLSSQRLIKEACDESRFDKNLSQGLKFARDFLGDGLFTSWTHEPNWKKAHNILGPSFSQRAMKRYHAMMVDIAVQLVQKWERLNADEHIEVSEDMTRLTLDTIGLCGFNYRFNSFYRDQPHPFIVSVVRALDEVMNKLQRANPDDPAYDENKRQCQEDIKVMNDYVDKIIADRKARGEQSHDLLTQMLNGKDPETGEPLDDGNIRYQIITFLIAGHETTSGLLSFALYFLVKNPHVLQKVAEEAARVLVDPVPSYKQVKQLKYVGMVLNEALRLWPTGPAFSLYAKEDTVLGGEYPLTKGDEVMVLIPQLHRDKTIWGDDVEEFRPERFENPSAIPQHAFKPFGNGQRACIGQQFALHEATLVLGMMLKHFDFEDHTNYELVIKEKLALKPEGFVVKAKSKGIPLGGIPSPSTEQSAKKVRKKAENAHNTPLLVLYGSNAGTAEGTARDLADIAMSKGFAPQVATLDSHAGNLPREGAVLIVTASYNGHPPDNAKQFVDWLDQASADEVKGVRYSVFGCGDKNWAATYQKVPAFIDETLAAKGAENIADRGEADASDDFEGTYEEWSDHMWSDVAAYFNLDIENSEDNKSTLSLQFVDSAADMPLAKMHGAFSTNVVASKELQQPGSARSTRHLEIELPKEASYQEGDHLGVIPRNYEGIVNRVTARFGLSASQQIRLEAEEEKLAHLPLAKTVSVEELLQYVELQDPVTRTQLRAMAAKTVCPPHKVELEALLEKQAYKEQVLAKRLTMLELLEKYPACEMKFSEFIALLPSIRPRYYSISSSPRVDEKQASITVSVVSGPAWSGYGEYKGIASNYLAELQEGDTITCFISTDQSEFTLPKDPETPLIMVGPGTGVAPFRGFVQARKQLKEQGQSLGEAHLYFGCRSPHEDYLYQEELENAQSEGIITLHTAFSRMPNQPKTYVQHVMEQDGKKLIELLDQGAHFYICGDGSQMAPAVEATLMKSYADVHQVSEADARLWLQQLEEKGRYAKDVWAG

SEQ ID NO: 229 - DNA, 3147 bp, synthetic construct
  misc_feature 1..3147: note = Variant of cytochrome P450
  source 1..3147: mol_type = other DNA
atgacaattaaggaaatgcctcagcctaagacgtttggagaacttaaaaatttaccgttattaaacacagataaaccggttcaagctttgatgcgtattgcggatgaattaggagaaatctttaaattcgaggcgcctggtagcgtaacgcgctttttatcaagtcagcgtctaattaaagaagcatgcgatgaatcacgctttgataaaaacttaagtcaaggccttaaatttgcacgtgattttcttggagacgggttatttacaagctggacgcatgaaccgaattggaaaaaagcgcataatatcttaggcccaagctttagtcagcgtgcaatgaaacgttatcatgcgatgatggtcgatatcgccgtgcagcttgttcaaaagtgggagcgtctaaatgcagatgagcatattgaagtatcggaagacatgacacgtttaacgctggatacaattggtctttgcggcttcaactatcgctttaacagcttttaccgagatcagcctcatccatttattgtgagtgccgtgcgtgcactggatgaagtaatgaacaagctgcagcgagcaaatccagacgacccagcttatgatgaaaacaagcgccagtgtcaagaagccattaaggtgctgaacgactatgtcgataaaattattgcagatcgcaaagcaaggggtgaacaaagccatgatttattaacgcagatgctaaacggaaaagatccagaaacgggtgagccgcttgatgacgggaacattcgttatcaaattgcgagtttcttaattgcgggacacgaaacaacaagtggtcttttatcatttgcgctgtatttcttagtgaaaaatccacatgtattacaaaaagtagcagaagaagcagcacgagttctagtagatcctgttccaagctacaaacaagtcaaacagcttaaatatgtcggcatggtcttaaacgaagcgctgcgcttatggccaactgctcctgcgttttccctatatgcaaaagaagatacggtgcttggaggagaatatcctttaaccaaaggcgacgaagtaatggttctgattcctcagcttcaccgtgataaaacaatttggggagacgatgtggaggagttccgtccagagcgttttgaaaatccaagtgcgattccgcagcatgcgtttaaaccgtttggaaacggtcagcgtgcgtgtatcggtcagcagttcgctcttcatgaagcaacgctggtacttggtatgatgctaaaacactttgactttgaagatcatacaaactacgagctcgttattaaagaaaagttaacgttaaaacctgaaggctttgtggtaaaagcaaaatcgaaaggcattccgcttggcggtattccttcacctagcactgaacagtctgctaaaaaagtacgcaaaaaggcagaaaacgctcataatacgccgctgcttgtgctatacggttcaaatgcgggaacagctgaaggaacggcgcgtgatttagcagatattgcaatgagcaaaggatttgcaccgcaggtcgcaacgcttgattcacacgccggaaatcttccgcgcgaaggagctgtattaattgtaacggcgtcttataacggtcatccgcctgataacgcaaagcaatttgtcgactggttagaccaagcgtctgctgatgaagtaaaaggcgttcgctactccgtatttggatgcggcgataaaaactgggctgcgacgtatcaaaaagtgcctgcttttatcgatgaaacgcttgccgctaaaggggcagaaaacatcgctgaccgcggtgaagcagatgcaagcgacgactttgaaggcacatatgaagaatggagtgatcatatgtggagtgacgtagcagcctactttaacctcgacattgaaaacagtgaagataataaatctactctttcacttcaatttgtcgacagcgccgcggatatgccgcttgcgaaaatgcacggtgcgttttcaacgaacgtcgtagcaagcaaagaacttcaacagccaggcagtgcacgaagcacgcgacatcttgaaattgaacttccaaaagaagcttcttatcaagaaggagatcatttaggtgttattcctcgcaactatgaaggaatagtaaaccgtgtaacagcaaggttcggcctaagcgcatcacagcaaatccgtctggaagcagaagaagaaaaattagctcatttgccactcgctaaaacagtatccgtagaagagcttctgcaatacgtggagcttcaagatcctgttacgcgcacgcagcttcgcgcaatggctgctaaaacggtctgcccgccgcataaagtagagcttgaagccttgcttgaaaagcaagcctacaaagaacaagtgctggcaaaacgtttaacaatgcttgaactgcttgaaaaatacccggcgtgtgaaatgaaattcagcgaatttatcgcccttctgccaagcatacgcccgcgctattactcgatttcttcatcacctcgtgtcgatgaaaaacaagcaagcatcacggtcagcgttgtctcaggaccggcgtggagcggatatggagaatataaaggaattgcgtcgaactatcttgccgagctgcaagaaggagatacgattacgtgctttatttccacagatcagtcagaatttacgctgccaaaagaccctgaaacgccgcttatcatggtcggaccgggaacaggcgtcgcgccgtttagaggctttgtgcaggcgcgcaaacagctaaaagaacaaggacagtcacttggagaagcacatttatacttcggctgccgttcacctcatgaagactatctgtatcaagaagagcttgaaaacgcccaaagcgaaggcatcattacgcttcataccgctttttctcgcatgccaaatcagccgaaaacatacgttcagcacgtaatggaacaagacggcaagaaattgattgaacttcttgatcaaggagcgcacttctatatttgcggagacggaagccaaatggcacctgccgttgaagcaacgcttatgaaaagctatgctgacgttcaccaagtgagtgaagcagacgctcgcttatggctgcagcagctagaagaaaaaggccgatacgcaaaagacgtgtgggctggg

SEQ ID NO: 230 - protein, 1049 aa, synthetic construct
  REGION 1..1049: note = Variant of cytochrome P450
MTIKEMPQPKTFGELKNLPLLNTDKPVQALMRIADELGEIFKFEAPGSVTRFLSSQRLIKEACDESRFDKNLSQGLKFARDFLGDGLFTSWTHEPNWKKAHNILGPSFSQRAMKRYHAMMVDIAVQLVQKWERLNADEHIEVSEDMTRLTLDTIGLCGFNYRFNSFYRDQPHPFIVSAVRALDEVMNKLQRANPDDPAYDENKRQCQEAIKVLNDYVDKIIADRKARGEQSHDLLTQMLNGKDPETGEPLDDGNIRYQIASFLIAGHETTSGLLSFALYFLVKNPHVLQKVAEEAARVLVDPVPSYKQVKQLKYVGMVLNEALRLWPTAPAFSLYAKEDTVLGGEYPLTKGDEVMVLIPQLHRDKTIWGDDVEEFRPERFENPSAIPQHAFKPFGNGQRACIGQQFALHEATLVLGMMLKHFDFEDHTNYELVIKEKLTLKPEGFVVKAKSKGIPLGGIPSPSTEQSAKKVRKKAENAHNTPLLVLYGSNAGTAEGTARDLADIAMSKGFAPQVATLDSHAGNLPREGAVLIVTASYNGHPPDNAKQFVDWLDQASADEVKGVRYSVFGCGDKNWAATYQKVPAFIDETLAAKGAENIADRGEADASDDFEGTYEEWSDHMWSDVAAYFNLDIENSEDNKSTLSLQFVDSAADMPLAKMHGAFSTNVVASKELQQPGSARSTRHLEIELPKEASYQEGDHLGVIPRNYEGIVNRVTARFGLSASQQIRLEAEEEKLAHLPLAKTVSVEELLQYVELQDPVTRTQLRAMAAKTVCPPHKVELEALLEKQAYKEQVLAKRLTMLELLEKYPACEMKFSEFIALLPSIRPRYYSISSSPRVDEKQASITVSVVSGPAWSGYGEYKGIASNYLAELQEGDTITCFISTDQSEFTLPKDPETPLIMVGPGTGVAPFRGFVQARKQLKEQGQSLGEAHLYFGCRSPHEDYLYQEELENAQSEGIITLHTAFSRMPNQPKTYVQHVMEQDGKKLIELLDQGAHFYICGDGSQMAPAVEATLMKSYADVHQVSEADARLWLQQLEEKGRYAKDVWAG

SEQ ID NO: 231 - DNA, 3147 bp, synthetic construct
  misc_feature 1..3147: note = Variant of cytochrome P450
  source 1..3147: mol_type = other DNA
atgacaattaaggaaatgcctcagcctaagacgtttggagaacttaaaaatttaccgttattaaacacagataaaccggttcaagctttgatgcgtattgcggatgaattaggagaaatctttaaattcgaggcgcctggtagcgtaacgcgctttttatcaagtcagcgtctaattaaagaagcatgcgatgaatcacgctttgataaaaacttaagtcaaggccttaaatttgcacgtgatgtctcgggagacggcttatttacaagctggacgcatgaaccgaattggaaaaaagcgcataatatcttaggcccaagctttagtcagcgtgcaatgaaacgttatcatgcgatgatggtcgatatcgccgtgcagcttgttcaaaagtgggagcgtctaaatgcagatgagcatattgaagtatcggaagacatgacacgtttaacgctggatacaattggtctttgcggcttcaactatcgctttaacagcttttaccgagatcagcctcatccatttattgtgagtgtcgtgcgtgcactggatgaagtaatgaacaagctgcagcgagcaaatccagacgacccagcttatgatgaaaacaagcgccagtgtcaagaagatatcaaggtgatgaacgactatgtcgataaaattattgcagatcgcaaagcaaggggtgaacaaagccatgatttattaacgcagatgctaaacggaaaagatccagaaacgggtgagccgcttgatgacgggaacattcgttatcaaattattacattcttaattgcgggacacgaaacaacaagtggtcttttatcatttgcgctgtatttcttagtgaaaaatccacatgtattacaaaaagtagcagaagaagcagcacgagttctagtagatcctgttccaagctacaaacaagtcaaacagcttaaatatgtcggcatggtcttaaacgaagcgctgcgcttatggccaactgctcctgcgttttccctatatgcaaaagaagatacggtgcttggaggagaatatcctttaaccaaaggcgacgaagtaatggttctgattcctcagcttcaccgtgataaaacaatttggggagacgatgtggaggagttccgtccagagcgttttgaaaatccaagtgcgattccgcagcatgcgtttaaaccgtttggaaacggtcagcgtgcgtgtatcggtcagcagttcgctcttcatgaagcaacgctggtacttggtatgatgctaaaacactttgactttgaagatcatacaaactacgagctcgttattaaagaaaagttaacgttaaaacctgaaggctttgtggtaaaagcaaaatcgaaaggcattccgcttggcggtattccttcacctagcactgaacagtctgctaaaaaagtacgcaaaaaggcagaaaacgctcataatacgccgctgcttgtgctatacggttcaaatgcgggaacagctgaaggaacggcgcgtgatttagcagatattgcaatgagcaaaggatttgcaccgcaggtcgcaacgcttgattcacacgccggaaatcttccgcgcgaaggagctgtattaattgtaacggcgtcttataacggtcatccgcctgataacgcaaagcaatttgtcgactggttagaccaagcgtctgctgatgaagtaaaaggcgttcgctactccgtatttggatgcggcgataaaaactgggctgcgacgtatcaaaaagtgcctgcttttatcgatgaaacgcttgccgctaaaggggcagaaaacatcgctgaccgcggtgaagcagatgcaagcgacgactttgaaggcacatatgaagaatggagtgatcatatgtggagtgacgtagcagcctactttaacctcgacattgaaaacagtgaagataataaatctactctttcacttcaatttgtcgacagcgccgcggatatgccgcttgcgaaaatgcacggtgcgttttcaacgaacgtcgtagcaagcaaagaacttcaacagccaggcagtgcacgaagcacgcgacatcttgaaattgaacttccaaaagaagcttcttatcaagaaggagatcatttaggtgttattcctcgcaactatgaaggaatagtaaaccgtgtaacagcaaggttcggcctaagcgcatcacagcaaatccgtctggaagcagaagaagaaaaattagctcatttgccactcgctaaaacagtatccgtagaagagcttctgcaatacgtggagcttcaagatcctgttacgcgcacgcagcttcgcgcaatggctgctaaaacggtctgcccgccgcataaagtagagcttgaagccttgcttgaaaagcaagcctacaaagaacaagtgctggcaaaacgtttaacaatgcttgaactgcttgaaaaatacccggcgtgtgaaatgaaattcagcgaatttatcgcccttctgccaagcatacgcccgcgctattactcgatttcttcatcacctcgtgtcgatgaaaaacaagcaagcatcacggtcagcgttgtctcaggaccggcgtggagcggatatggagaatataaaggaattgcgtcgaactatcttgccgagctgcaagaaggagatacgattacgtgctttatttccacagatcagtcagaatttacgctgccaaaagaccctgaaacgccgcttatcatggtcggaccgggaacaggcgtcgcgccgtttagaggctttgtgcaggcgcgcaaacagctaaaagaacaaggacagtcacttggagaagcacatttatacttcggctgccgttcacctcatgaagactatctgtatcaagaagagcttgaaaacgcccaaagcgaaggcatcattacgcttcataccgctttttctcgcatgccaaatcagccgaaaacatacgttcagcacgtaatggaacaagacggcaagaaattgattgaacttcttgatcaaggagcgcacttctatatttgcggagacggaagccaaatggcacctgccgttgaagcaacgcttatgaaaagctatgctgacgttcaccaagtgagtgaagcagacgctcgcttatggctgcagcagctagaagaaaaaggccgatacgcaaaagacgtgtgggctggg

SEQ ID NO: 232 - protein, 1049 aa, synthetic construct
  REGION 1..1049: note = Variant of cytochrome P450
MTIKEMPQPKTFGELKNLPLLNTDKPVQALMRIADELGEIFKFEAPGSVTRFLSSQRLIKEACDESRFDKNLSQGLKFARDVSGDGLFTSWTHEPNWKKAHNILGPSFSQRAMKRYHAMMVDIAVQLVQKWERLNADEHIEVSEDMTRLTLDTIGLCGFNYRFNSFYRDQPHPFIVSVVRALDEVMNKLQRANPDDPAYDENKRQCQEDIKVMNDYVDKIIADRKARGEQSHDLLTQMLNGKDPETGEPLDDGNIRYQIITFLIAGHETTSGLLSFALYFLVKNPHVLQKVAEEAARVLVDPVPSYKQVKQLKYVGMVLNEALRLWPTAPAFSLYAKEDTVLGGEYPLTKGDEVMVLIPQLHRDKTIWGDDVEEFRPERFENPSAIPQHAFKPFGNGQRACIGQQFALHEATLVLGMMLKHFDFEDHTNYELVIKEKLTLKPEGFVVKAKSKGIPLGGIPSPSTEQSAKKVRKKAENAHNTPLLVLYGSNAGTAEGTARDLADIAMSKGFAPQVATLDSHAGNLPREGAVLIVTASYNGHPPDNAKQFVDWLDQASADEVKGVRYSVFGCGDKNWAATYQKVPAFIDETLAAKGAENIADRGEADASDDFEGTYEEWSDHMWSDVAAYFNLDIENSEDNKSTLSLQFVDSAADMPLAKMHGAFSTNVVASKELQQPGSARSTRHLEIELPKEASYQEGDHLGVIPRNYEGIVNRVTARFGLSASQQIRLEAEEEKLAHLPLAKTVSVEELLQYVELQDPVTRTQLRAMAAKTVCPPHKVELEALLEKQAYKEQVLAKRLTMLELLEKYPACEMKFSEFIALLPSIRPRYYSISSSPRVDEKQASITVSVVSGPAWSGYGEYKGIASNYLAELQEGDTITCFISTDQSEFTLPKDPETPLIMVGPGTGVAPFRGFVQARKQLKEQGQSLGEAHLYFGCRSPHEDYLYQEELENAQSEGIITLHTAFSRMPNQPKTYVQHVMEQDGKKLIELLDQGAHFYICGDGSQMAPAVEATLMKSYADVHQVSEADARLWLQQLEEKGRYAKDVWAG

SEQ ID NO: 233 - DNA, 3147 bp, synthetic construct
  misc_feature 1..3147: note = Variant of cytochrome P450
  source 1..3147: mol_type = other DNA
atgacaattaaggaaatgcctcagcctaagacgtttggagaacttaaaaatttaccgttattaaacacagataaaccggttcaagctttgatgcgtattgcggatgaattaggagaaatctttaaattcgaggcgcctggtagcgtaacgcgctttttatcaagtcagcgtctaattaaagaagcatgcgatgaatcacgctttgataaaaacttaagtcaaggccttaaatttgcacgtgattttcttggagacgggttatttacaagctggacgcatgaaccgaattggaaaaaagcgcataatatcttaggcccaagctttagtcagcgtgcaatgaaacgttatcatgcgatgatggtcgatatcgccgtgcagcttgttcaaaagtgggagcgtctaaatgcagatgagcatattgaagtatcggaagacatgacacgtttaacgctggatacaattggtctttgcggcttcaactatcgctttaacagcttttaccgagatcagcctcatccatttattgtgagtgttgtgcgtgcactggatgaagtaatgaacaagctgcagcgagcaaatccagacgacccagcttatgatgaaaacaagcgccagtgtcaagaaaacattaaggtgatgaacgactatgtcgataaaattattgcagatcgcaaagcaaggggtgaacaaagccatgatttattaacgcagatgctaaacggaaaagatccagaaacgggtgagccgcttgatgacgggaacattcgttatcaaattgcgactttcttaattgcgggacacgaaacaacaagtggtcttttatcatttgcgctgtatttcttagtgaaaaatccacatgtattacaaaaagtagcagaagaagcagcacgagttctagtagatcctgttccaagctacaaacaagtcaaacagcttaaatatgtcggcatggtcttaaacgaagcgctgcgcttatggccaactgctcctgcgttttccctatatgcaaaagaagatacggtgcttggaggagaatatcctttaaccaaaggcgacgaagtaatggttctgattcctcagcttcaccgtgataaaacaatttggggagacgatgtggaggagttccgtccagagcgttttgaaaatccaagtgcgattccgcagcatgcgtttaaaccgtttggaaacggtcagcgtgcgtgtatcggtcagcagttcgctcttcatgaagcaacgctggtacttggtatgatgctaaaacactttgactttgaagatcatacaaactacgagctcgttattaaagaaaagttaacgttaaaacctgaaggctttgtggtaaaagcaaaatcgaaaggcattccgcttggcggtattccttcacctagcactgaacagtctgctaaaaaagtacgcaaaaaggcagaaaacgctcataatacgccgctgcttgtgctatacggttcaaatgcgggaacagctgaaggaacggcgcgtgatttagcagatattgcaatgagcaaaggatttgcaccgcaggtcgcaacgcttgattcacacgccggaaatcttccgcgcgaaggagctgtattaattgtaacggcgtcttataacggtcatccgcctgataacgcaaagcaatttgtcgactggttagaccaagcgtctgctgatgaagtaaaaggcgttcgctactccgtatttggatgcggcgataaaaactgggctgcgacgtatcaaaaagtgcctgcttttatcgatgaaacgcttgccgctaaaggggcagaaaacatcgctgaccgcggtgaagcagatgcaagcgacgactttgaaggcacatatgaagaatggagtgatcatatgtggagtgacgtagcagcctactttaacctcgacattgaaaacagtgaagataataaatctactctttcacttcaatttgtcgacagcgccgcggatatgccgcttgcgaaaatgcacggtgcgttttcaacgaacgtcgtagcaagcaaagaacttcaacagccaggcagtgcacgaagcacgcgacatcttgaaattgaacttccaaaagaagcttcttatcaagaaggagatcatttaggtgttattcctcgcaactatgaaggaatagtaaaccgtgtaacagcaaggttcggcctaagcgcatcacagcaaatccgtctggaagcagaagaagaaaaattagctcatttgccactcgctaaaacagtatccgtagaagagcttctgcaatacgtggagcttcaagatcctgttacgcgcacgcagcttcgcgcaatggctgctaaaacggtctgcccgccgcataaagtagagcttgaagccttgcttgaaaagcaagcctacaaagaacaagtgctggcaaaacgtttaacaatgcttgaactgcttgaaaaatacccggcgtgtgaaatgaaattcagcgaatttatcgcccttctgccaagcatacgcccgcgctattactcgatttcttcatcacctcgtgtcgatgaaaaacaagcaagcatcacggtcagcgttgtctcaggaccggcgtggagcggatatggagaatataaaggaattgcgtcgaactatcttgccgagctgcaagaaggagatacgattacgtgctttatttccacagatcagtcagaatttacgctgccaaaagaccctgaaacgccgcttatcatggtcggaccgggaacaggcgtcgcgccgtttagaggctttgtgcaggcgcgcaaacagctaaaagaacaaggacagtcacttggagaagcacatttatacttcggctgccgttcacctcatgaagactatctgtatcaagaagagcttgaaaacgcccaaagcgaaggcatcattacgcttcataccgctttttctcgcatgccaaatcagccgaaaacatacgttcagcacgtaatggaacaagacggcaagaaattgattgaacttcttgatcaaggagcgcacttctatatttgcggagacggaagccaaatggcacctgccgttgaagcaacgcttatgaaaagctatgctgacgttcaccaagtgagtgaagcagacgctcgcttatggctgcagcagctagaagaaaaaggccgatacgcaaaagacgtgtgggctggg

SEQ ID NO: 234 - protein, 1049 aa, synthetic construct
  REGION 1..1049: note = Variant of cytochrome P450
MTIKEMPQPKTFGELKNLPLLNTDKPVQALMRIADELGEIFKFEAPGSVTRFLSSQRLIKEACDESRFDKNLSQGLKFARDFLGDGLFTSWTHEPNWKKAHNILGPSFSQRAMKRYHAMMVDIAVQLVQKWERLNADEHIEVSEDMTRLTLDTIGLCGFNYRFNSFYRDQPHPFIVSVVRALDEVMNKLQRANPDDPAYDENKRQCQENIKVMNDYVDKIIADRKARGEQSHDLLTQMLNGKDPETGEPLDDGNIRYQIATFLIAGHETTSGLLSFALYFLVKNPHVLQKVAEEAARVLVDPVPSYKQVKQLKYVGMVLNEALRLWPTAPAFSLYAKEDTVLGGEYPLTKGDEVMVLIPQLHRDKTIWGDDVEEFRPERFENPSAIPQHAFKPFGNGQRACIGQQFALHEATLVLGMMLKHFDFEDHTNYELVIKEKLTLKPEGFVVKAKSKGIPLGGIPSPSTEQSAKKVRKKAENAHNTPLLVLYGSNAGTAEGTARDLADIAMSKGFAPQVATLDSHAGNLPREGAVLIVTASYNGHPPDNAKQFVDWLDQASADEVKGVRYSVFGCGDKNWAATYQKVPAFIDETLAAKGAENIADRGEADASDDFEGTYEEWSDHMWSDVAAYFNLDIENSEDNKSTLSLQFVDSAADMPLAKMHGAFSTNVVASKELQQPGSARSTRHLEIELPKEASYQEGDHLGVIPRNYEGIVNRVTARFGLSASQQIRLEAEEEKLAHLPLAKTVSVEELLQYVELQDPVTRTQLRAMAAKTVCPPHKVELEALLEKQAYKEQVLAKRLTMLELLEKYPACEMKFSEFIALLPSIRPRYYSISSSPRVDEKQASITVSVVSGPAWSGYGEYKGIASNYLAELQEGDTITCFISTDQSEFTLPKDPETPLIMVGPGTGVAPFRGFVQARKQLKEQGQSLGEAHLYFGCRSPHEDYLYQEELENAQSEGIITLHTAFSRMPNQPKTYVQHVMEQDGKKLIELLDQGAHFYICGDGSQMAPAVEATLMKSYADVHQVSEADARLWLQQLEEKGRYAKDVWAG

SEQ ID NO: 235 - DNA, 3147 bp, synthetic construct
  misc_feature 1..3147: note = Variant of cytochrome P450
  source 1..3147: mol_type = other DNA
atgacaattaaggaaatgcctcagcctaagacgtttggagaacttaaaaatttaccgttattaaacacagataaaccggttcaagctttgatgcgtattgcggatgaattaggagaaatctttaaattcgaggcgcctggtagcgtaacgcgctttttatcaagtcagcgtctaattaaagaagcatgcgatgaatcacgctttgataaaaacttaagtcaaggccttaaatttgcacgtgattttcttggagacgggttatttacaagctggacgcatgaaccgaattggaaaaaagcgcataatatcttaggcccaagctttagtcagcgtgcaatgaaacgttatcatgcgatgatggtcgatatcgccgtgcagcttgttcaaaagtgggagcgtctaaatgcagatgagcatattgaagtatcggaagacatgacacgtttaacgctggatacaattggtctttgcggcttcaactatcgctttaacagcttttaccgagatcagcctcatccatttattgtgagtggcgtgcgtgcactggatgaagtaatgaacaagctgcagcgagcaaatccagacgacccagcttatgatgaaaacaagcgccagtgtcaagaaaacattaaggtgatgaacgactatgtcgataaaattattgcagatcgcaaagcaaggggtgaacaaagccatgatttattaacgcagatgctaaacggaaaagatccagaaacgggtgagccgcttgatgacgggaacattcgttatcaaattgcgactttcttaattgcgggacacgaaacaacaagtggtcttttatcatttgcgctgtatttcttagtgaaaaatccacatgtattacaaaaagtagcagaagaagcagcacgagttctagtagatcctgttccaagctacaaacaagtcaaacagcttaaatatgtcggcatggtcttaaacgaagcgctgcgcttatggccaactgctcctgcgttttccctatatgcaaaagaagatacggtgcttggaggagaatatcctttaaccaaaggcgacgaagtaatggttctgattcctcagcttcaccgtgataaaacaatttggggagacgatgtggaggagttccgtccagagcgttttgaaaatccaagtgcgattccgcagcatgcgtttaaaccgtttggaaacggtcagcgtgcgtgtatcggtcagcagttcgctcttcatgaagcaacgctggtacttggtatgatgctaaaacactttgactttgaagatcatacaaactacgagctcgttattaaagaaaagttaacgttaaaacctgaaggctttgtggtaaaagcaaaatcgaaaggcattccgcttggcggtattccttcacctagcactgaacagtctgctaaaaaagtacgcaaaaaggcagaaaacgctcataatacgccgctgcttgtgctatacggttcaaatgcgggaacagctgaaggaacggcgcgtgatttagcagatattgcaatgagcaaaggatttgcaccgcaggtcgcaacgcttgattcacacgccggaaatcttccgcgcgaaggagctgtattaattgtaacggcgtcttataacggtcatccgcctgataacgcaaagcaatttgtcgactggttagaccaagcgtctgctgatgaagtaaaaggcgttcgctactccgtatttggatgcggcgataaaaactgggctgcgacgtatcaaaaagtgcctgcttttatcgatgaaacgcttgccgctaaaggggcagaaaacatcgctgaccgcggtgaagcagatgcaagcgacgactttgaaggcacatatgaagaatggagtgatcatatgtggagtgacgtagcagcctactttaacctcgacattgaaaacagtgaagataataaatctactctttcacttcaatttgtcgacagcgccgcggatatgccgcttgcgaaaatgcacggtgcgttttcaacgaacgtcgtagcaagcaaagaacttcaacagccaggcagtgcacgaagcacgcgacatcttgaaattgaacttccaaaagaagcttcttatcaagaaggagatcatttaggtgttattcctcgcaactatgaaggaatagtaaaccgtgtaacagcaaggttcggcctaagcgcatcacagcaaatccgtctggaagcagaagaagaaaaattagctcatttgccactcgctaaaacagtatccgtagaagagcttctgcaatacgtggagcttcaagatcctgttacgcgcacgcagcttcgcgcaatggctgctaaaacggtctgcccgccgcataaagtagagcttgaagccttgcttgaaaagcaagcctacaaagaacaagtgctggcaaaacgtttaacaatgcttgaactgcttgaaaaatacccggcgtgtgaaatgaaattcagcgaatttatcgcccttctgccaagcatacgcccgcgctattactcgatttcttcatcacctcgtgtcgatgaaaaacaagcaagcatcacggtcagcgttgtctcaggaccggcgtggagcggatatggagaatataaaggaattgcgtcgaactatcttgccgagctgcaagaaggagatacgattacgtgctttatttccacagatcagtcagaatttacgctgccaaaagaccctgaaacgccgcttatcatggtcggaccgggaacaggcgtcgcgccgtttagaggctttgtgcaggcgcgcaaacagctaaaagaacaaggacagtcacttggagaagcacatttatacttcggctgccgttcacctcatgaagactatctgtatcaagaagagcttgaaaacgcccaaagcgaaggcatcattacgcttcataccgctttttctcgcatgccaaatcagccgaaaacatacgttcagcacgtaatggaacaagacggcaagaaattgattgaacttcttgatcaaggagcgcacttctatatttgcggagacggaagccaaatggcacctgccgttgaagcaacgcttatgaaaagctatgctgacgttcaccaagtgagtgaagcagacgctcgcttatggctgcagcagctagaagaaaaaggccgatacgcaaaagacgtgtgggctggg

SEQ ID NO: 236 - protein, 1049 aa, synthetic construct
  REGION 1..1049: note = Variant of cytochrome P450
MTIKEMPQPKTFGELKNLPLLNTDKPVQALMRIADELGEIFKFEAPGSVTRFLSSQRLIKEACDESRFDKNLSQGLKFARDFLGDGLFTSWTHEPNWKKAHNILGPSFSQRAMKRYHAMMVDIAVQLVQKWERLNADEHIEVSEDMTRLTLDTIGLCGFNYRFNSFYRDQPHPFIVSGVRALDEVMNKLQRANPDDPAYDENKRQCQENIKVMNDYVDKIIADRKARGEQSHDLLTQMLNGKDPETGEPLDDGNIRYQIATFLIAGHETTSGLLSFALYFLVKNPHVLQKVAEEAARVLVDPVPSYKQVKQLKYVGMVLNEALRLWPTAPAFSLYAKEDTVLGGEYPLTKGDEVMVLIPQLHRDKTIWGDDVEEFRPERFENPSAIPQHAFKPFGNGQRACIGQQFALHEATLVLGMMLKHFDFEDHTNYELVIKEKLTLKPEGFVVKAKSKGIPLGGIPSPSTEQSAKKVRKKAENAHNTPLLVLYGSNAGTAEGTARDLADIAMSKGFAPQVATLDSHAGNLPREGAVLIVTASYNGHPPDNAKQFVDWLDQASADEVKGVRYSVFGCGDKNWAATYQKVPAFIDETLAAKGAENIADRGEADASDDFEGTYEEWSDHMWSDVAAYFNLDIENSEDNKSTLSLQFVDSAADMPLAKMHGAFSTNVVASKELQQPGSARSTRHLEIELPKEASYQEGDHLGVIPRNYEGIVNRVTARFGLSASQQIRLEAEEEKLAHLPLAKTVSVEELLQYVELQDPVTRTQLRAMAAKTVCPPHKVELEALLEKQAYKEQVLAKRLTMLELLEKYPACEMKFSEFIALLPSIRPRYYSISSSPRVDEKQASITVSVVSGPAWSGYGEYKGIASNYLAELQEGDTITCFISTDQSEFTLPKDPETPLIMVGPGTGVAPFRGFVQARKQLKEQGQSLGEAHLYFGCRSPHEDYLYQEELENAQSEGIITLHTAFSRMPNQPKTYVQHVMEQDGKKLIELLDQGAHFYICGDGSQMAPAVEATLMKSYADVHQVSEADARLWLQQLEEKGRYAKDVWAG

SEQ ID NO: 237 - DNA, 3147 bp, synthetic construct
  misc_feature 1..3147: note = Variant of cytochrome P450
  source 1..3147: mol_type = other DNA
atgacaattaaggaaatgcctcagcctaagacgtttggagaacttaaaaatttaccgttattaaacacagataaaccggttcaagctttgatgcgtattgcggatgaattaggagaaatctttaaattcgaggcgcctggtagcgtaacgcgctttttatcaagtcagcgtctaattaaagaagcatgcgatgaatcacgctttgataaaaacttaagtcaaggccttaaatttgcacgtgattttcttggagacgggttatttacaagctggacgcatgaaccgaattggaaaaaagcgcataatatcttaggcccaagctttagtcagcgtgcaatgaaacgttatcatgcgatgatggtcgatatcgccgtgcagcttgttcaaaagtgggagcgtctaaatgcagatgagcatattgaagtatcggaagacatgacacgtttaacgctggatacaattggtctttgcggcttcaactatcgctttaacagcttttaccgagatcagcctcatccatttattgtgagtgttgtgcgtgcactggatgaagtaatgaacaagctgcagcgagcaaatccagacgacccagcttatgatgaaaacaagcgccagtgtcaagaagacgttaaggtgctgaacgactatgtcgataaaattattgcagatcgcaaagcaaggggtgaacaaagccatgatttattaacgcagatgctaaacggaaaagatccagaaacgggtgagccgcttgatgacgggaacattcgttatcaaattatcactttcttaattgcgggacacgaaacaacaagtggtcttttatcatttgcgctgtatttcttagtgaaaaatccacatgtattacaaaaagtagcagaagaagcagcacgagttctagtagatcctgttccaagctacaaacaagtcaaacagcttaaatatgtcggcatggtcttaaacgaagcgctgcgcttatggccaactgctcctgcgttttccctatatgcaaaagaagatacggtgcttggaggagaatatcctttaaccaaaggcgacgaagtaatggttctgattcctcagcttcaccgtgataaaacaatttggggagacgatgtggaggagttccgtccagagcgttttgaaaatccaagtgcgattccgcagcatgcgtttaaaccgtttggaaacggtcagcgtgcgtgtatcggtcagcagttcgctcttcatgaagcaacgctggtacttggtatgatgctaaaacactttgactttgaagatcatacaaactacgagctcgttattaaagaaaagttaacgttaaaacctgaaggctttgtggtaaaagcaaaatcgaaaggcattccgcttggcggtattccttcacctagcactgaacagtctgctaaaaaagtacgcaaaaaggcagaaaacgctcataatacgccgctgcttgtgctatacggttcaaatgcgggaacagctgaaggaacggcgcgtgatttagcagatattgcaatgagcaaaggatttgcaccgcaggtcgcaacgcttgattcacacgccggaaatcttccgcgcgaaggagctgtattaattgtaacggcgtcttataacggtcatccgcctgataacgcaaagcaatttgtcgactggttagaccaagcgtctgctgatgaagtaaaaggcgttcgctactccgtatttggatgcggcgataaaaactgggctgcgacgtatcaaaaagtgcctgcttttatcgatgaaacgcttgccgctaaaggggcagaaaacatcgctgaccgcggtgaagcagatgcaagcgacgactttgaaggcacatatgaagaatggagtgatcatatgtggagtgacgtagcagcctactttaacctcgacattgaaaacagtgaagataataaatctactctttcacttcaatttgtcgacagcgccgcggatatgccgcttgcgaaaatgcacggtgcgttttcaacgaacgtcgtagcaagcaaagaacttcaacagccaggcagtgcacgaagcacgcgacatcttgaaattgaacttccaaaagaagcttcttatcaagaaggagatcatttaggtgttattcctcgcaactatgaaggaatagtaaaccgtgtaacagcaaggttcggcctaagcgcatcacagcaaatccgtctggaagcagaagaagaaaaattagctcatttgccactcgctaaaacagtatccgtagaagagcttctgcaatacgtggagcttcaagatcctgttacgcgcacgcagcttcgcgcaatggctgctaaaacggtctgcccgccgcataaagtagagcttgaagccttgcttgaaaagcaagcctacaaagaacaagtgctggcaaaacgtttaacaatgcttgaactgcttgaaaaatacccggcgtgtgaaatgaaattcagcgaatttatcgcccttctgccaagcatacgcccgcgctattactcgatttcttcatcacctcgtgtcgatgaaaaacaagcaagcatcacggtcagcgttgtctcaggaccggcgtggagcggatatggagaatataaaggaattgcgtcgaactatcttgccgagctgcaagaaggagatacgattacgtgctttatttccacagatcagtcagaatttacgctgccaaaagaccctgaaacgccgcttatcatggtcggaccgggaacaggcgtcgcgccgtttagaggctttgtgcaggcgcgcaaacagctaaaagaacaaggacagtcacttggagaagcacatttatacttcggctgccgttcacctcatgaagactatctgtatcaagaagagcttgaaaacgcccaaagcgaaggcatcattacgcttcataccgctttttctcgcatgccaaatcagccgaaaacatacgttcagcacgtaatggaacaagacggcaagaaattgattgaacttcttgatcaaggagcgcacttctatatttgcggagacggaagccaaatggcacctgccgttgaagcaacgcttatgaaaagctatgctgacgttcaccaagtgagtgaagcagacgctcgcttatggctgcagcagctagaagaaaaaggccgatacgcaaaagacgtgtgggctggg

SEQ ID NO: 238 - protein, 1049 aa, synthetic construct
  REGION 1..1049: note = Variant of cytochrome P450
MTIKEMPQPKTFGELKNLPLLNTDKPVQALMRIADELGEIFKFEAPGSVTRFLSSQRLIKEACDESRFDKNLSQGLKFARDFLGDGLFTSWTHEPNWKKAHNILGPSFSQRAMKRYHAMMVDIAVQLVQKWERLNADEHIEVSEDMTRLTLDTIGLCGFNYRFNSFYRDQPHPFIVSVVRALDEVMNKLQRANPDDPAYDENKRQCQEDVKVLNDYVDKIIADRKARGEQSHDLLTQMLNGKDPETGEPLDDGNIRYQIITFLIAGHETTSGLLSFALYFLVKNPHVLQKVAEEAARVLVDPVPSYKQVKQLKYVGMVLNEALRLWPTAPAFSLYAKEDTVLGGEYPLTKGDEVMVLIPQLHRDKTIWGDDVEEFRPERFENPSAIPQHAFKPFGNGQRACIGQQFALHEATLVLGMMLKHFDFEDHTNYELVIKEKLTLKPEGFVVKAKSKGIPLGGIPSPSTEQSAKKVRKKAENAHNTPLLVLYGSNAGTAEGTARDLADIAMSKGFAPQVATLDSHAGNLPREGAVLIVTASYNGHPPDNAKQFVDWLDQASADEVKGVRYSVFGCGDKNWAATYQKVPAFIDETLAAKGAENIADRGEADASDDFEGTYEEWSDHMWSDVAAYFNLDIENSEDNKSTLSLQFVDSAADMPLAKMHGAFSTNVVASKELQQPGSARSTRHLEIELPKEASYQEGDHLGVIPRNYEGIVNRVTARFGLSASQQIRLEAEEEKLAHLPLAKTVSVEELLQYVELQDPVTRTQLRAMAAKTVCPPHKVELEALLEKQAYKEQVLAKRLTMLELLEKYPACEMKFSEFIALLPSIRPRYYSISSSPRVDEKQASITVSVVSGPAWSGYGEYKGIASNYLAELQEGDTITCFISTDQSEFTLPKDPETPLIMVGPGTGVAPFRGFVQARKQLKEQGQSLGEAHLYFGCRSPHEDYLYQEELENAQSEGIITLHTAFSRMPNQPKTYVQHVMEQDGKKLIELLDQGAHFYICGDGSQMAPAVEATLMKSYADVHQVSEADARLWLQQLEEKGRYAKDVWAG

SEQ ID NO: 239 - DNA, 3147 bp, synthetic construct
  misc_feature 1..3147: note = Variant of cytochrome P450
  source 1..3147: mol_type = other DNA
atgacaattaaggaaatgcctcagcctaagacgtttggagaacttaaaaatttaccgttattaaacacagataaaccggttcaagctttgatgcgtattgcggatgaattaggagaaatctttaaattcgaggcgcctggtagcgtaacgcgctttttatcaagtcagcgtctaattaaagaagcatgcgatgaatcacgctttgataaaaacttaagtcaaggccttaaatttgcacgtgatttcctgggagacggcttagtgacaagctggacgcatgaaccgaattggaaaaaagcgcataatatcttaggcccaagctttagtcagcgtgcaatgaaacgttatcatgcgatgatggtcgatatcgccgtgcagcttgttcaaaagtgggagcgtctaaatgcagatgagcatattgaagtatcggaagacatgacacgtttaacgctggatacaattggtctttgcggcttcaactatcgctttaacagcttttaccgagatcagcctcatccatttattgtgagtgtcgtgcgtgcactggatgaagtaatgaacaagctgcagcgagcaaatccagacgacccagcttatgatgaaaacaagcgccagtgtcaagaagatatcaaggtgatgaacgactatgtcgataaaattattgcagatcgcaaagcaaggggtgaacaaagccatgatttattaacgcagatgctaaacggaaaagatccagaaacgggtgagccgcttgatgacgggaacattcgttatcaaattattacattcttaattgcgggacacgaaacaacaagtggtcttttatcatttgcgctgtatttcttagtgaaaaatccacatgtattacaaaaagtagcagaagaagcagcacgagttctagtagatcctgttccaagctacaaacaagtcaaacagcttaaatatgtcggcatggtcttaaacgaagcgctgcgcttatggccaactgctcctgcgttttccctatatgcaaaagaagatacggtgcttggaggagaatatcctttaaccaaaggcgacgaagtaatggttctgattcctcagcttcaccgtgataaaacaatttggggagacgatgtggaggagttccgtccagagcgttttgaaaatccaagtgcgattccgcagcatgcgtttaaaccgtttggaaacggtcagcgtgcgtgtatcggtcagcagttcgctcttcatgaagcaacgctggtacttggtatgatgctaaaacactttgactttgaagatcatacaaactacgagctcgttattaaagaaaagttaacgttaaaacctgaaggctttgtggtaaaagcaaaatcgaaaggcattccgcttggcggtattccttcacctagcactgaacagtctgctaaaaaagtacgcaaaaaggcagaaaacgctcataatacgccgctgcttgtgctatacggttcaaatgcgggaacagctgaaggaacggcgcgtgatttagcagatattgcaatgagcaaaggatttgcaccgcaggtcgcaacgcttgattcacacgccggaaatcttccgcgcgaaggagctgtattaattgtaacggcgtcttataacggtcatccgcctgataacgcaaagcaatttgtcgactggttagaccaagcgtctgctgatgaagtaaaaggcgttcgctactccgtatttggatgcggcgataaaaactgggctgcgacgtatcaaaaagtgcctgcttttatcgatgaaacgcttgccgctaaaggggcagaaaacatcgctgaccgcggtgaagcagatgcaagcgacgactttgaaggcacatatgaagaatggagtgatcatatgtggagtgacgtagcagcctactttaacctcgacattgaaaacagtgaagataataaatctactctttcacttcaatttgtcgacagcgccgcggatatgccgcttgcgaaaatgcacggtgcgttttcaacgaacgtcgtagcaagcaaagaacttcaacagccaggcagtgcacgaagcacgcgacatcttgaaattgaacttccaaaagaagcttcttatcaagaaggagatcatttaggtgttattcctcgcaactatgaaggaatagtaaaccgtgtaacagcaaggttcggcctaagcgcatcacagcaaatccgtctggaagcagaagaagaaaaattagctcatttgccactcgctaaaacagtatccgtagaagagcttctgcaatacgtggagcttcaagatcctgttacgcgcacgcagcttcgcgcaatggctgctaaaacggtctgcccgccgcataaagtagagcttgaagccttgcttgaaaagcaagcctacaaagaacaagtgctggcaaaacgtttaacaatgcttgaactgcttgaaaaatacccggcgtgtgaaatgaaattcagcgaatttatcgcccttctgccaagcatacgcccgcgctattactcgatttcttcatcacctcgtgtcgatgaaaaacaagcaagcatcacggtcagcgttgtctcaggaccggcgtggagcggatatggagaatataaaggaattgcgtcgaactatcttgccgagctgcaagaaggagatacgattacgtgctttatttccacagatcagtcagaatttacgctgccaaaagaccctgaaacgccgcttatcatggtcggaccgggaacaggcgtcgcgccgtttagaggctttgtgcaggcgcgcaaacagctaaaagaacaaggacagtcacttggagaagcacatttatacttcggctgccgttcacctcatgaagactatctgtatcaagaagagcttgaaaacgcccaaagcgaaggcatcattacgcttcataccgctttttctcgcatgccaaatcagccgaaaacatacgttcagcacgtaatggaacaagacggcaagaaattgattgaacttcttgatcaaggagcgcacttctatatttgcggagacggaagccaaatggcacctgccgttgaagcaacgcttatgaaaagctatgctgacgttcaccaagtgagtgaagcagacgctcgcttatggctgcagcagctagaagaaaaaggccgatacgcaaaagacgtgtgggctggg

SEQ ID NO: 240 - protein, 1049 aa, synthetic construct
  REGION 1..1049: note = Variant of cytochrome P450
MTIKEMPQPKTFGELKNLPLLNTDKPVQALMRIADELGEIFKFEAPGSVTRFLSSQRLIKEACDESRFDKNLSQGLKFARDFLGDGLVTSWTHEPNWKKAHNILGPSFSQRAMKRYHAMMVDIAVQLVQKWERLNADEHIEVSEDMTRLTLDTIGLCGFNYRFNSFYRDQPHPFIVSVVRALDEVMNKLQRANPDDPAYDENKRQCQEDIKVMNDYVDKIIADRKARGEQSHDLLTQMLNGKDPETGEPLDDGNIRYQIITFLIAGHETTSGLLSFALYFLVKNPHVLQKVAEEAARVLVDPVPSYKQVKQLKYVGMVLNEALRLWPTAPAFSLYAKEDTVLGGEYPLTKGDEVMVLIPQLHRDKTIWGDDVEEFRPERFENPSAIPQHAFKPFGNGQRACIGQQFALHEATLVLGMMLKHFDFEDHTNYELVIKEKLTLKPEGFVVKAKSKGIPLGGIPSPSTEQSAKKVRKKAENAHNTPLLVLYGSNAGTAEGTARDLADIAMSKGFAPQVATLDSHAGNLPREGAVLIVTASYNGHPPDNAKQFVDWLDQASADEVKGVRYSVFGCGDKNWAATYQKVPAFIDETLAAKGAENIADRGEADASDDFEGTYEEWSDHMWSDVAAYFNLDIENSEDNKSTLSLQFVDSAADMPLAKMHGAFSTNVVASKELQQPGSARSTRHLEIELPKEASYQEGDHLGVIPRNYEGIVNRVTARFGLSASQQIRLEAEEEKLAHLPLAKTVSVEELLQYVELQDPVTRTQLRAMAAKTVCPPHKVELEALLEKQAYKEQVLAKRLTMLELLEKYPACEMKFSEFIALLPSIRPRYYSISSSPRVDEKQASITVSVVSGPAWSGYGEYKGIASNYLAELQEGDTITCFISTDQSEFTLPKDPETPLIMVGPGTGVAPFRGFVQARKQLKEQGQSLGEAHLYFGCRSPHEDYLYQEELENAQSEGIITLHTAFSRMPNQPKTYVQHVMEQDGKKLIELLDQGAHFYICGDGSQMAPAVEATLMKSYADVHQVSEADARLWLQQLEEKGRYAKDVWAG

SEQ ID NO: 241 - DNA, 3147 bp, synthetic construct
  misc_feature 1..3147: note = Variant of cytochrome P450
  source 1..3147: mol_type = other DNA
atgacaattaaggaaatgcctcagcctaagacgtttggagaacttaaaaatttaccgttattaaacacagataaaccggttcaagctttgatgcgtattgcggatgaattaggagagatctttaaattcgaggcgcctggtagcgtaacgcgctttgtgtcaggtcagcgtctagtcaaagaagcatgcgatgaatcacgctttgataaaaacttaagtcaaggccttaaatttgtgcgtgcctttcttggagacgggttatttacaagctggacgcatgaaccgaattggaaaaaagcgcataatatcttaggcccaagctttagtcagcgtgcaatgaaacgttatcatgcgatgatggtcgatatcgccgtgcagcttgttcaaaagtgggagcgtctaaatgcagatgagcatattgaagtatcggaagacatgacacgtttaacgctggatacaattggtctttgcggcttcaactatcgctttaacagcttttaccgagatcagcctcatccatttattgtgagtgttgtgcgtgcactggatgaagttatgaacaagctgcagcgagcaaatccagacgacccagcttatgatgaaaacaagcgccagtgtcaagaagatatcaaggtgatgaacgactacgtcgataaaattattgcagatcgcaaagcaaggggtgaacaaagccatgatttattaacgcagatgctaaacggaaaagatccagaaacgggtgagccgcttgatgacgagaacattcgttatcaaattattacattcttaattgcgggacacgaaacaacaagtggtcttttatcatttgcgctgtatttcttagtgaaaaatccacatgtattacaaaaagtagcagaagaagcagcacgagttctagtagatcctgttccaagctacaaacaagtcaaacagcttaaatatgtcggcatggtcttaaacgaagcgctgcgcttatggccaactgctcctgcgttttccctatatgcaaaagaagatacggtgcttggaggagaatatcctttaaccaaaggcgacgaagtaatggttctgattcctcagcttcaccgtgataaaacaatttggggagacgatgtggaggagttccgtccagagcgttttgaaaatccaagtgcgattccgcagcatgcgtttaaaccgtttggaaacggtcagcgtgcgtgtatcggtcagcagttcgctcttcatgaagcaacgctggtacttggtatgatgctaaaacactttgactttgaagatcatacaaactacgagctcgttattaaagaaaagttaacgttaaaacctgaaggctttgtggtaaaagcaaaatcgaaaggcattccgcttggcggtattccttcacctagcactgaacagtctgctaaaaaagtacgcaaaaaggcagaaaacgctcataatacgccgctgcttgtgctatacggttcaaatgcgggaacagctgaaggaacggcgcgtgatttagcagatattgcaatgagcaaaggatttgcaccgcaggtcgcaacgcttgattcacacgccggaaatcttccgcgcgaaggagctgtattaattgtaacggcgtcttataacggtcatccgcctgataacgcaaagcaatttgtcgactggttagaccaagcgtctgctgatgaagtaaaaggcgttcgctactccgtatttggatgcggcgataaaaactgggctgcgacgtatcaaaaagtgcctgcttttatcgatgaaacgcttgccgctaaaggggcagaaaacatcgctgaccgcggtgaagcagatgcaagcgacgactttgaaggcacatatgaagaatggagtgatcatatgtggagtgacgtagcagcctactttaacctcgacattgaaaacagtgaagataataaatctactctttcacttcaatttgtcgacagcgccgcggatatgccgcttgcgaaaatgcacggtgcgttttcaacgaacgtcgtagcaagcaaagaacttcaacagccaggcagtgcacgaagcacgcgacatcttgaaattgaacttccaaaagaagcttcttatcaagaaggagatcatttaggtgttattcctcgcaactatgaaggaatagtaaaccgtgtaacagcaaggttcggcctaagcgcatcacagcaaatccgtctggaagcagaagaagaaaaattagctcatttgccactcgctaaaacagtatccgtagaagagcttctgcaatacgtggagcttcaagatcctgttacgcgcacgcagcttcgcgcaatggctgctaaaacggtctgcccgccgcataaagtagagcttgaagccttgcttgaaaagcaagcctacaaagaacaagtgctggcaaaacgtttaacaatgcttgaactgcttgaaaaatacccggcgtgtgaaatgaaattcagcgaatttatcgcccttctgccaagcatacgcccgcgctattactcgatttcttcatcacctcgtgtcgatgaaaaacaagcaagcatcacggtcagcgttgtctcaggaccggcgtggagcggatatggagaatataaaggaattgcgtcgaactatcttgccgagctgcaagaaggagatacgattacgtgctttatttccacagatcagtcagaatttacgctgccaaaagaccctgaaacgccgcttatcatggtcggaccgggaacaggcgtcgcgccgtttagaggctttgtgcaggcgcgcaaacagctaaaagaacaaggacagtcacttggagaagcacatttatacttcggctgccgttcacctcatgaagactatctgtatcaagaagagcttgaaaacgcccaaagcgaaggcatcattacgcttcataccgctttttctcgcatgccaaatcagccgaaaacatacgttcagcacgtaatggaacaagacggcaagaaattgattgaacttcttgatcaaggagcgcacttctatatttgcggagacggaagccaaatggcacctgccgttgaagcaacgcttatgaaaagctatgctgacgttcaccaagtgagtgaagcagacgctcgcttatggctgcagcagctagaagaaaaaggccgatacgcaaaagacgtgtgggctggg

SEQ ID NO: 242 - protein, 1049 aa, synthetic construct
  REGION 1..1049: note = Variant of cytochrome P450
MTIKEMPQPKTFGELKNLPLLNTDKPVQALMRIADELGEIFKFEAPGSVTRFVSGQRLVKEACDESRFDKNLSQGLKFVRAFLGDGLFTSWTHEPNWKKAHNILGPSFSQRAMKRYHAMMVDIAVQLVQKWERLNADEHIEVSEDMTRLTLDTIGLCGFNYRFNSFYRDQPHPFIVSVVRALDEVMNKLQRANPDDPAYDENKRQCQEDIKVMNDYVDKIIADRKARGEQSHDLLTQMLNGKDPETGEPLDDENIRYQIITFLIAGHETTSGLLSFALYFLVKNPHVLQKVAEEAARVLVDPVPSYKQVKQLKYVGMVLNEALRLWPTAPAFSLYAKEDTVLGGEYPLTKGDEVMVLIPQLHRDKTIWGDDVEEFRPERFENPSAIPQHAFKPFGNGQRACIGQQFALHEATLVLGMMLKHFDFEDHTNYELVIKEKLTLKPEGFVVKAKSKGIPLGGIPSPSTEQSAKKVRKKAENAHNTPLLVLYGSNAGTAEGTARDLADIAMSKGFAPQVATLDSHAGNLPREGAVLIVTASYNGHPPDNAKQFVDWLDQASADEVKGVRYSVFGCGDKNWAATYQKVPAFIDETLAAKGAENIADRGEADASDDFEGTYEEWSDHMWSDVAAYFNLDIENSEDNKSTLSLQFVDSAADMPLAKMHGAFSTNVVASKELQQPGSARSTRHLEIELPKEASYQEGDHLGVIPRNYEGIVNRVTARFGLSASQQIRLEAEEEKLAHLPLAKTVSVEELLQYVELQDPVTRTQLRAMAAKTVCPPHKVELEALLEKQAYKEQVLAKRLTMLELLEKYPACEMKFSEFIALLPSIRPRYYSISSSPRVDEKQASITVSVVSGPAWSGYGEYKGIASNYLAELQEGDTITCFISTDQSEFTLPKDPETPLIMVGPGTGVAPFRGFVQARKQLKEQGQSLGEAHLYFGCRSPHEDYLYQEELENAQSEGIITLHTAFSRMPNQPKTYVQHVMEQDGKKLIELLDQGAHFYICGDGSQMAPAVEATLMKSYADVHQVSEADARLWLQQLEEKGRYAKDVWAG

SEQ ID NO: 243 - DNA, 3147 bp, synthetic construct
  misc_feature 1..3147: note = Variant of cytochrome P450
  source 1..3147: mol_type = other DNA
atgacaattaaggaaatgcctcagcctaagacgtttggagaacttaaaaatttaccgttattaaacacagataaaccggttcaagctttgatgcgtattgcggatgaattaggagaaatctttaaattcgaggcgcctggtagcgtaacgcgctttttatcaagtcagcgtctaattaaagaagcatgcgatgaatcacgctttgataaaaacttaagtcaaggccttaaatttgcacgtgattttcttggagacgggttatttacaagctggacgcatgaaccgaattggaaaaaagcgcataatatcttaggcccaagctttagtcagcgtgcaatgaaacgttatcatgcgatgatggtcgatatcgccgtgcagcttgttcaaaagtgggagcgtctaaatgcagatgagcatattgaagtatcggaagacatgacacgtttaacgctggatacaattggtctttgcggcttcaactatcgctttaacagcttttaccgagatcagcctcatccatttattgtgagtgttgtgcgtgcagtggatgaagtaatgaacaagctgcagcgagcaaatccagacgacccagcttatgatgaaaacaagcgccagtgtcaagaagatatcaaggtgatgaacgactatgtcgataaaattattgcagatcgcaaagcaaggggtgaacaaagccatgatttattaacgcagatgctaaacggaaaagatccagaaacgggtgagccgcttgatgacgggaacattcgttatcaaattattacattcttaattgcgggacacgaaacaacaagtggtcttttatcatttgcgctgtatttcttagtgaaaaatccacatgtattacaaaaagtagcagaagaagcagcacgagttctagtagatcctgttccaagctacaaacaagtcaaacagcttaaatatgtcggcatggtcttaaacgaagcgctgcgcttatggccaactgttcctgcgttttccctatatgcaaaagaagatacggtgcttggaggagaatatcctttaaccaaaggcgacgaagtaatggttctgattcctcagcttcaccgtgataaaacaatttggggagacgatgtggaggagttccgtccagagcgttttgaaaatccaagtgcgattccgcagcatgcgtttaaaccgtttggaaacggtcagcgtgcgtgtatcggtcagcagttcgctcttcatgaagcaacgctggtacttggtatgatgctaaaacactttgactttgaagatcatacaaactacgagctcgttattaaagaaaagttaacgttaaaacctgaaggctttgtggtaaaagcaaaatcgaaaggcattccgcttggcggtattccttcacctagcactgaacagtctgctaaaaaagtacgcaaaaaggcagaaaacgctcataatacgccgctgcttgtgctatacggttcaaatgcgggaacagctgaaggaacggcgcgtgatttagcagatattgcaatgagcaaaggatttgcaccgcaggtcgcaacgcttgattcacacgccggaaatcttccgcgcgaaggagctgtattaattgtaacggcgtcttataacggtcatccgcctgataacgcaaagcaatttgtcgactggttagaccaagcgtctgctgatgaagtaaaaggcgttcgctactccgtatttggatgcggcgataaaaactgggctgcgacgtatcaaaaagtgcctgcttttatcgatgaaacgcttgccgctaaaggggcagaaaacatcgctgaccgcggtgaagcagatgcaagcgacgactttgaaggcacatatgaagaatggagtgatcatatgtggagtgacgtagcagcctactttaacctcgacattgaaaacagtgaagataataaatctactctttcacttcaatttgtcgacagcgccgcggatatgccgcttgcgaaaatgcacggtgcgttttcaacgaacgtcgtagcaagcaaagaacttcaacagccaggcagtgcacgaagcacgcgacatcttgaaattgaacttccaaaagaagcttcttatcaagaaggagatcatttaggtgttattcctcgcaactatgaaggaatagtaaaccgtgtaacagcaaggttcggcctaagcgcatcacagcaaatccgtctggaagcagaagaagaaaaattagctcatttgccactcgctaaaacagtatccgtagaagagcttctgcaatacgtggagcttcaagatcctgttacgcgcacgcagcttcgcgcaatggctgctaaaacggtctgcccgccgcataaagtagagcttgaagccttgcttgaaaagcaagcctacaaagaacaagtgctggcaaaacgtttaacaatgcttgaactgcttgaaaaatacccggcgtgtgaaatgaaattcagcgaatttatcgcccttctgccaagcatacgcccgcgctattactcgatttcttcatcacctcgtgtcgatgaaaaacaagcaagcatcacggtcagcgttgtctcaggaccggcgtggagcggatatggagaatataaaggaattgcgtcgaactatcttgccgagctgcaagaaggagatacgattacgtgctttatttccacagatcagtcagaatttacgctgccaaaagaccctgaaacgccgcttatcatggtcggaccgggaacaggcgtcgcgccgtttagaggctttgtgcaggcgcgcaaacagctaaaagaacaaggacagtcacttggagaagcacatttatacttcggctgccgttcacctcatgaagactatctgtatcaagaagagcttgaaaacgcccaaagcgaaggcatcattacgcttcataccgctttttctcgcatgccaaatcagccgaaaacatacgttcagcacgtaatggaacaagacggcaagaaattgattgaacttcttgatcaaggagcgcacttctatatttgcggagacggaagccaaatggcacctgccgttgaagcaacgcttatgaaaagctatgctgacgttcaccaagtgagtgaagcagacgctcgcttatggctgcagcagctagaagaaaaaggccgatacgcaaaagacgtgtgggctggg

SEQ ID NO: 244 - protein, 1049 aa, synthetic construct
  REGION 1..1049: note = Variant of cytochrome P450
MTIKEMPQPKTFGELKNLPLLNTDKPVQALMRIADELGEIFKFEAPGSVTRFLSSQRLIKEACDESRFDKNLSQGLKFARDFLGDGLFTSWTHEPNWKKAHNILGPSFSQRAMKRYHAMMVDIAVQLVQKWERLNADEHIEVSEDMTRLTLDTIGLCGFNYRFNSFYRDQPHPFIVSVVRAVDEVMNKLQRANPDDPAYDENKRQCQEDIKVMNDYVDKIIADRKARGEQSHDLLTQMLNGKDPETGEPLDDGNIRYQIITFLIAGHETTSGLLSFALYFLVKNPHVLQKVAEEAARVLVDPVPSYKQVKQLKYVGMVLNEALRLWPTVPAFSLYAKEDTVLGGEYPLTKGDEVMVLIPQLHRDKTIWGDDVEEFRPERFENPSAIPQHAFKPFGNGQRACIGQQFALHEATLVLGMMLKHFDFEDHTNYELVIKEKLTLKPEGFVVKAKSKGIPLGGIPSPSTEQSAKKVRKKAENAHNTPLLVLYGSNAGTAEGTARDLADIAMSKGFAPQVATLDSHAGNLPREGAVLIVTASYNGHPPDNAKQFVDWLDQASADEVKGVRYSVFGCGDKNWAATYQKVPAFIDETLAAKGAENIADRGEADASDDFEGTYEEWSDHMWSDVAAYFNLDIENSEDNKSTLSLQFVDSAADMPLAKMHGAFSTNVVASKELQQPGSARSTRHLEIELPKEASYQEGDHLGVIPRNYEGIVNRVTARFGLSASQQIRLEAEEEKLAHLPLAKTVSVEELLQYVELQDPVTRTQLRAMAAKTVCPPHKVELEALLEKQAYKEQVLAKRLTMLELLEKYPACEMKFSEFIALLPSIRPRYYSISSSPRVDEKQASITVSVVSGPAWSGYGEYKGIASNYLAELQEGDTITCFISTDQSEFTLPKDPETPLIMVGPGTGVAPFRGFVQARKQLKEQGQSLGEAHLYFGCRSPHEDYLYQEELENAQSEGIITLHTAFSRMPNQPKTYVQHVMEQDGKKLIELLDQGAHFYICGDGSQMAPAVEATLMKSYADVHQVSEADARLWLQQLEEKGRYAKDVWAG

SEQ ID NO: 245 - DNA, 3147 bp, synthetic construct
  misc_feature 1..3147: note = Variant of cytochrome P450
  source 1..3147: mol_type = other DNA
atgacaattaaggaaatgcctcagcctaagacgtttggagaacttaaaaatttaccgttattaaacacagataaaccggttcaagctttgatgcgtattgcggatgaattaggagaaatctttaaattcgaggcgcctggtagcgtaacgcgctttttatcaagtcagcgtctaattaaagaagcatgcgatgaatcacgctttgataaaaacttaagtcaaggccttaaatttgcgcgtgcctttcttggagacgggttatttacaagctggacgcatgaaccgaattggaaaaaagcgcataatatcttaggcccaagctttagtcagcgtgcaatgaaacgttatcatgcgatgatggtcgatatcgccgtgcagcttgttcaaaagtgggagcgtctaaatgcagatgagcatattgaagtatcggaagacatgacacgtttaacgctggatacaattggtctttgcggcttcaactatcgctttaacagcttttaccgagatcagcctcatccatttattgtgagtgttgtgcgtgcactggatgaagtaatgaacaagctgcagcgagcaaatccagacgacccagcttatgatgaaaacaagcgccagtgtcaagaagatatcaaggtgatgaacgactatgtcgataaaattattgcagatcgcaaagcaaggggtgaacaaagccatgatttattaacgcagatgctaaacggaaaagatccagaaacgggtgagccgcttgatgacgggaacattcgttatcaaattattacattcttaattgcgggacacgaaacaacaagtggtcttttatcatttgcgctgtatttcttagtgaaaaatccacatgtattacaaaaagtagcagaagaagcagcacgagttctagtagatcctgttccaagctacaaacaagtcaaacagcttaaatatgtcggcatggtcttaaacgaagcgctgcgcttatggccaactgctcctgcgttttccctatatgcaaaagaagatacggtgcttggaggagaatatcctttaaccaaaggcgacgaagtaatggttctgattcctcagcttcaccgtgataaaacaatttggggagacgatgtggaggagttccgtccagagcgttttgaaaatccaagtgcgattccgcagcatgcgtttaaaccgtttggaaacggtcagcgtgcgtgtatcggtcagcagttcgctcttcatgaagcaacgctggtacttggtatgatgctaaaacactttgactttgaagatcatacaaactacgagctcgttattaaagaaaagttaacgttaaaacctgaaggctttgtggtaaaagcaaaatcgaaaggcattccgcttggcggtattccttcacctagcactgaacagtctgctaaaaaagtacgcaaaaaggcagaaaacgctcataatacgccgctgcttgtgctatacggttcaaatgcgggaacagctgaaggaacggcgcgtgatttagcagatattgcaatgagcaaaggatttgcaccgcaggtcgcaacgcttgattcacacgccggaaatcttccgcgcgaaggagctgtattaattgtaacggcgtcttataacggtcatccgcctgataacgcaaagcaatttgtcgactggttagaccaagcgtctgctgatgaagtaaaaggcgttcgctactccgtatttggatgcggcgataaaaactgggctgcgacgtatcaaaaagtgcctgcttttatcgatgaaacgcttgccgctaaaggggcagaaaacatcgctgaccgcggtgaagcagatgcaagcgacgactttgaaggcacatatgaagaatggagtgatcatatgtggagtgacgtagcagcctactttaacctcgacattgaaaacagtgaagataataaatctactctttcacttcaatttgtcgacagcgccgcggatatgccgcttgcgaaaatgcacggtgcgttttcaacgaacgtcgtagcaagcaaagaacttcaacagccaggcagtgcacgaagcacgcgacatcttgaaattgaacttccaaaagaagcttcttatcaagaaggagatcatttaggtgttattcctcgcaactatgaaggaatagtaaaccgtgtaacagcaaggttcggcctaagcgcatcacagcaaatccgtctggaagcagaagaagaaaaattagctcatttgccactcgctaaaacagtatccgtagaagagcttctgcaatacgtggagcttcaagatcctgttacgcgcacgcagcttcgcgcaatggctgctaaaacggtctgcccgccgcataaagtagagcttgaagccttgcttgaaaagcaagcctacaaagaacaagtgctggcaaaacgtttaacaatgcttgaactgcttgaaaaatacccggcgtgtgaaatgaaattcagcgaatttatcgcccttctgccaagcatacgcccgcgctattactcgatttcttcatcacctcgtgtcgatgaaaaacaagcaagcatcacggtcagcgttgtctcaggaccggcgtggagcggatatggagaatataaaggaattgcgtcgaactatcttgccgagctgcaagaaggagatacgattacgtgctttatttccacagatcagtcagaatttacgctgccaaaagaccctgaaacgccgcttatcatggtcggaccgggaacaggcgtcgcgccgtttagaggctttgtgcaggcgcgcaaacagctaaaagaacaaggacagtcacttggagaagcacatttatacttcggctgccgttcacctcatgaagactatctgtatcaagaagagcttgaaaacgcccaaagcgaaggcatcattacgcttcataccgctttttctcgcatgccaaatcagccgaaaacatacgttcagcacgtaatggaacaagacggcaagaaattgattgaacttcttgatcaaggagcgcacttctatatttgcggagacggaagccaaatggcacctgccgttgaagcaacgcttatgaaaagctatgctgacgttcaccaagtgagtgaagcagacgctcgcttatggctgcagcagctagaagaaaaaggccgatacgcaaaagacgtgtgggctggg

SEQ ID NO: 246 - protein, 1049 aa, synthetic construct
  REGION 1..1049: note = Variant of cytochrome P450
MTIKEMPQPKTFGELKNLPLLNTDKPVQALMRIADELGEIFKFEAPGSVTRFLSSQRLIKEACDESRFDKNLSQGLKFARAFLGDGLFTSWTHEPNWKKAHNILGPSFSQRAMKRYHAMMVDIAVQLVQKWERLNADEHIEVSEDMTRLTLDTIGLCGFNYRFNSFYRDQPHPFIVSVVRALDEVMNKLQRANPDDPAYDENKRQCQEDIKVMNDYVDKIIADRKARGEQSHDLLTQMLNGKDPETGEPLDDGNIRYQIITFLIAGHETTSGLLSFALYFLVKNPHVLQKVAEEAARVLVDPVPSYKQVKQLKYVGMVLNEALRLWPTAPAFSLYAKEDTVLGGEYPLTKGDEVMVLIPQLHRDKTIWGDDVEEFRPERFENPSAIPQHAFKPFGNGQRACIGQQFALHEATLVLGMMLKHFDFEDHTNYELVIKEKLTLKPEGFVVKAKSKGIPLGGIPSPSTEQSAKKVRKKAENAHNTPLLVLYGSNAGTAEGTARDLADIAMSKGFAPQVATLDSHAGNLPREGAVLIVTASYNGHPPDNAKQFVDWLDQASADEVKGVRYSVFGCGDKNWAATYQKVPAFIDETLAAKGAENIADRGEADASDDFEGTYEEWSDHMWSDVAAYFNLDIENSEDNKSTLSLQFVDSAADMPLAKMHGAFSTNVVASKELQQPGSARSTRHLEIELPKEASYQEGDHLGVIPRNYEGIVNRVTARFGLSASQQIRLEAEEEKLAHLPLAKTVSVEELLQYVELQDPVTRTQLRAMAAKTVCPPHKVELEALLEKQAYKEQVLAKRLTMLELLEKYPACEMKFSEFIALLPSIRPRYYSISSSPRVDEKQASITVSVVSGPAWSGYGEYKGIASNYLAELQEGDTITCFISTDQSEFTLPKDPETPLIMVGPGTGVAPFRGFVQARKQLKEQGQSLGEAHLYFGCRSPHEDYLYQEELENAQSEGIITLHTAFSRMPNQPKTYVQHVMEQDGKKLIELLDQGAHFYICGDGSQMAPAVEATLMKSYADVHQVSEADARLWLQQLEEKGRYAKDVWAG

SEQ ID NO: 247 - DNA, 3147 bp, synthetic construct
  misc_feature 1..3147: note = Variant of cytochrome P450
  source 1..3147: mol_type = other DNA
atgacaattaaggaaatgcctcagcctaagacgtttggagaacttaaaaatttaccgttattaaacacagataaaccggttcaagctttgatgcgtattgcggatgaattaggagagatctttaaattcgaggcgcctggtagcgtaacgcgctttttatcaagtcagcgtctaatcaaagaagcatgcgatgaatcacgctttgataaaaacttaagtcaaggccttaaatttgtgcgtgactttcttggagacgggttatttacaagctggacgcatgaaccgaattggaaaaaagcgcataatatcttaggcccaagctttagtcagcgtgcaatgaaacgttatcatgcgatgatggtcgatatcgccgtgcagcttgttcaaaagtgggagcgtctaaatgcagatgagcatattgaagtatcggaagacatgacacgtttaacgctggatacaattggtctttgcggcttcaactatcgctttaacagcttttaccgagatcagcctcatccatttattgtgagtgttgtgcgtgcactggatgaagctatgaacaagctgcagcgagcaaatccagacgacccagcttatgatgaaaacaagcgccagtgtcaagaagatatcaaggtgatgaacgacctggtcgataaaattattgcagatcgcaaagcaaggggtgaacaaagccatgatttattaacgcagatgctaaacggaaaagatccagaaacgggtgagccgcttgatgacgggaacattcgttatcaaattattacattcttaattgcgggacacgaaacaacaagtggtcttttatcatttgcgctgtatttcttagtgaaaaatccacatgtattacaaaaagtagcagaagaagcagcacgagttctagtagatcctgttccaagctacaaacaagtcaaacagcttaaatatgtcggcatggtcttaaacgaagcgctgcgcttatggccaactgctcctgcgttttccctatatgcaaaagaagatacggtgcttggaggagaatatcctttaaccaaaggcgacgaagtaatggttctgattcctcagcttcaccgtgataaaacaatttggggagacgatgtggaggagttccgtccagagcgttttgaaaatccaagtgcgattccgcagcatgcgtttaaaccgtttggaaacggtcagcgtgcgtgtatcggtcagcagttcgctcttcatgaagcaacgctggtacttggtatgatgctaaaacactttgactttgaagatcatacaaactacgagctcgttattaaagaaaagttaacgttaaaacctgaaggctttgtggtaaaagcaaaatcgaaaggcattccgcttggcggtattccttcacctagcactgaacagtctgctaaaaaagtacgcaaaaaggcagaaaacgctcataatacgccgctgcttgtgctatacggttcaaatgcgggaacagctgaaggaacggcgcgtgatttagcagatattgcaatgagcaaaggatttgcaccgcaggtcgcaacgcttgattcacacgccggaaatcttccgcgcgaaggagctgtattaattgtaacggcgtcttataacggtcatccgcctgataacgcaaagcaatttgtcgactggttagaccaagcgtctgctgatgaagtaaaaggcgttcgctactccgtatttggatgcggcgataaaaactgggctgcgacgtatcaaaaagtgcctgcttttatcgatgaaacgcttgccgctaaaggggcagaaaacatcgctgaccgcggtgaagcagatgcaagcgacgactttgaaggcacatatgaagaatggagtgatcatatgtggagtgacgtagcagcctactttaacctcgacattgaaaacagtgaagataataaatctactctttcacttcaatttgtcgacagcgccgcggatatgccgcttgcgaaaatgcacggtgcgttttcaacgaacgtcgtagcaagcaaagaacttcaacagccaggcagtgcacgaagcacgcgacatcttgaaattgaacttccaaaagaagcttcttatcaagaaggagatcatttaggtgttattcctcgcaactatgaaggaatagtaaaccgtgtaacagcaaggttcggcctaagcgcatcacagcaaatccgtctggaagcagaagaagaaaaattagctcatttgccactcgctaaaacagtatccgtagaagagcttctgcaatacgtggagcttcaagatcctgttacgcgcacgcagcttcgcgcaatggctgctaaaacggtctgcccgccgcataaagtagagcttgaagccttgcttgaaaagcaagcctacaaagaacaagtgctggcaaaacgtttaacaatgcttgaactgcttgaaaaatacccggcgtgtgaaatgaaattcagcgaatttatcgcccttctgccaagcatacgcccgcgctattactcgatttcttcatcacctcgtgtcgatgaaaaacaagcaagcatcacggtcagcgttgtctcaggaccggcgtggagcggatatggagaatataaaggaattgcgtcgaactatcttgccgagctgcaagaaggagatacgattacgtgctttatttccacagatcagtcagaatttacgctgccaaaagaccctgaaacgccgcttatcatggtcggaccgggaacaggcgtcgcgccgtttagaggctttgtgcaggcgcgcaaacagctaaaagaacaaggacagtcacttggagaagcacatttatacttcggctgccgttcacctcatgaagactatctgtatcaagaagagcttgaaaacgcccaaagcgaaggcatcattacgcttcataccgctttttctcgcatgccaaatcagccgaaaacatacgttcagcacgtaatggaacaagacggcaagaaattgattgaacttcttgatcaaggagcgcacttctatatttgcggagacggaagccaaatggcacctgccgttgaagcaacgcttatgaaaagctatgctgacgttcaccaagtgagtgaagcagacgctcgcttatggctgcagcagctagaagaaaaaggccgatacgcaaaagacgtgtgggctggg

SEQ ID NO: 248 - protein, 1049 aa, synthetic construct
  REGION 1..1049: note = Variant of cytochrome P450
MTIKEMPQPKTFGELKNLPLLNTDKPVQALMRIADELGEIFKFEAPGSVTRFLSSQRLIKEACDESRFDKNLSQGLKFVRDFLGDGLFTSWTHEPNWKKAHNILGPSFSQRAMKRYHAMMVDIAVQLVQKWERLNADEHIEVSEDMTRLTLDTIGLCGFNYRFNSFYRDQPHPFIVSVVRALDEAMNKLQRANPDDPAYDENKRQCQEDIKVMNDLVDKIIADRKARGEQSHDLLTQMLNGKDPETGEPLDDGNIRYQIITFLIAGHETTSGLLSFALYFLVKNPHVLQKVAEEAARVLVDPVPSYKQVKQLKYVGMVLNEALRLWPTAPAFSLYAKEDTVLGGEYPLTKGDEVMVLIPQLHRDKTIWGDDVEEFRPERFENPSAIPQHAFKPFGNGQRACIGQQFALHEATLVLGMMLKHFDFEDHTNYELVIKEKLTLKPEGFVVKAKSKGIPLGGIPSPSTEQSAKKVRKKAENAHNTPLLVLYGSNAGTAEGTARDLADIAMSKGFAPQVATLDSHAGNLPREGAVLIVTASYNGHPPDNAKQFVDWLDQASADEVKGVRYSVFGCGDKNWAATYQKVPAFIDETLAAKGAENIADRGEADASDDFEGTYEEWSDHMWSDVAAYFNLDIENSEDNKSTLSLQFVDSAADMPLAKMHGAFSTNVVASKELQQPGSARSTRHLEIELPKEASYQEGDHLGVIPRNYEGIVNRVTARFGLSASQQIRLEAEEEKLAHLPLAKTVSVEELLQYVELQDPVTRTQLRAMAAKTVCPPHKVELEALLEKQAYKEQVLAKRLTMLELLEKYPACEMKFSEFIALLPSIRPRYYSISSSPRVDEKQASITVSVVSGPAWSGYGEYKGIASNYLAELQEGDTITCFISTDQSEFTLPKDPETPLIMVGPGTGVAPFRGFVQARKQLKEQGQSLGEAHLYFGCRSPHEDYLYQEELENAQSEGIITLHTAFSRMPNQPKTYVQHVMEQDGKKLIELLDQGAHFYICGDGSQMAPAVEATLMKSYADVHQVSEADARLWLQQLEEKGRYAKDVWAG

SEQ ID NO: 249 - DNA, 3147 bp, synthetic construct
  misc_feature 1..3147: note = Variant of cytochrome P450
  source 1..3147: mol_type = other DNA
atgacaattaaggaaatgcctcagcctaagacgtttggagaacttaaaaatttaccgttattaaacacagataaaccggttcaagctttgatgcgtattgcggatgaattaggagaaatctttaaattcgaggcgcctggtagcgtaacgcgctttctgtcaggtcagcgtctagtcaaagaagcatgcgatgaatcacgctttgataaaaacttaagtcaaggccttaaatttgcgcgtgactttcttggagacgggttatttacaagctggacgcatgaaccgaattggaaaaaagcgcataatatcttaggcccaagctttagtcagcgtgcaatgaaacgttatcatgcgatgatggtcgatatcgccgtgcagcttgttcaaaagtgggagcgtctaaatgcagatgagcatattgaagtatcggaagacatgacacgtttaacgctggatacaattggtctttgcggcttcaactatcgctttaacagcttttaccgagatcagcctcatccatttattgtgagtgtggtgcgtgcactggatgaagttatgaacaagctgcagcgagcaaatccagacgacccagcttatgatgaaaacaagcgccagtttcaagaagatatcaaggtgatgaacgactatgtcgataaaattattgcagatcgcaaagcaaggggtgaacaaagccatgatttattaacgcagatgctaaacggaaaagatccagaaacgggtgagccgcttgatgacgggaacattcgttatcaaattattacattcttaattgcgggacacgaaacaacaagtggtcttttatcatttgcgctgtatttcttagtgaaaaatccacatgtattacaaaaagtagcagaagaagcagcacgagttctagtagatcctgttccaagctacaaacaagtcaaacagcttaaatatgtcggcatggtcttaaacgaagcgctgcgcttatggccaactgctcctgcgttttccctatatgcaaaagaagatacggtgcttggaggagaatatcctttaaccaaaggcgacgaagtaatggttctgattcctcagcttcaccgtgataaaacaatttggggagacgatgtggaggagttccgtccagagcgttttgaaaatccaagtgcgattccgcagcatgcgtttaaaccgtttggaaacggtcagcgtgcgtgtatcggtcagcagttcgctcttcatgaagcaacgctggtacttggtatgatgctaaaacactttgactttgaagatcatacaaactacgagctcgttattaaagaaaagttaacgttaaaacctgaaggctttgtggtaaaagcaaaatcgaaaggcattccgcttggcggtattccttcacctagcactgaacagtctgctaaaaaagtacgcaaaaaggcagaaaacgctcataatacgccgctgcttgtgctatacggttcaaatgcgggaacagctgaaggaacggcgcgtgatttagcagatattgcaatgagcaaaggatttgcaccgcaggtcgcaacgcttgattcacacgccggaaatcttccgcgcgaaggagctgtattaattgtaacggcgtcttataacggtcatccgcctgataacgcaaagcaatttgtcgactggttagaccaagcgtctgctgatgaagtaaaaggcgttcgctactccgtatttggatgcggcgataaaaactgggctgcgacgtatcaaaaagtgcctgcttttatcgatgaaacgcttgccgctaaaggggcagaaaacatcgctgaccgcggtgaagcagatgcaagcgacgactttgaaggcacatatgaagaatggagtgatcatatgtggagtgacgtagcagcctactttaacctcgacattgaaaacagtgaagataataaatctactctttcacttcaatttgtcgacagcgccgcggatatgccgcttgcgaaaatgcacggtgcgttttcaacgaacgtcgtagcaagcaaagaacttcaacagccaggcagtgcacgaagcacgcgacatcttgaaattgaacttccaaaagaagcttcttatcaagaaggagatcatttaggtgttattcctcgcaactatgaaggaatagtaaaccgtgtaacagcaaggttcggcctaagcgcatcacagcaaatccgtctggaagcagaagaagaaaaattagctcatttgccactcgctaaaacagtatccgtagaagagcttctgcaatacgtggagcttcaagatcctgttacgcgcacgcagcttcgcgcaatggctgctaaaacggtctgcccgccgcataaagtagagcttgaagccttgcttgaaaagcaagcctacaaagaacaagtgctggcaaaacgtttaacaatgcttgaactgcttgaaaaatacccggcgtgtgaaatgaaattcagcgaatttatcgcccttctgccaagcatacgcccgcgctattactcgatttcttcatcacctcgtgtcgatgaaaaacaagcaagcatcacggtcagcgttgtctcaggaccggcgtggagcggatatggagaatataaaggaattgcgtcgaactatcttgccgagctgcaagaaggagatacgattacgtgctttatttccacagatcagtcagaatttacgctgccaaaagaccctgaaacgccgcttatcatggtcggaccgggaacaggcgtcgcgccgtttagaggctttgtgcaggcgcgcaaacagctaaaagaacaaggacagtcacttggagaagcacatttatacttcggctgccgttcacctcatgaagactatctgtatcaagaagagcttgaaaacgcccaaagcgaaggcatcattacgcttcataccgctttttctcgcatgccaaatcagccgaaaacatacgttcagcacgtaatggaacaagacggcaagaaattgattgaacttcttgatcaaggagcgcacttctatatttgcggagacggaagccaaatggcacctgccgttgaagcaacgcttatgaaaagctatgctgacgttcaccaagtgagtgaagcagacgctcgcttatggctgcagcagctagaagaaaaaggccgatacgcaaaagacgtgtgggctggg

SEQ ID NO: 250 - protein, 1049 aa, synthetic construct
  REGION 1..1049: note = Variant of cytochrome P450
MTIKEMPQPKTFGELKNLPLLNTDKPVQALMRIADELGEIFKFEAPGSVTRFLSGQRLVKEACDESRFDKNLSQGLKFARDFLGDGLFTSWTHEPNWKKAHNILGPSFSQRAMKRYHAMMVDIAVQLVQKWERLNADEHIEVSEDMTRLTLDTIGLCGFNYRFNSFYRDQPHPFIVSVVRALDEVMNKLQRANPDDPAYDENKRQFQEDIKVMNDYVDKIIADRKARGEQSHDLLTQMLNGKDPETGEPLDDGNIRYQIITFLIAGHETTSGLLSFALYFLVKNPHVLQKVAEEAARVLVDPVPSYKQVKQLKYVGMVLNEALRLWPTAPAFSLYAKEDTVLGGEYPLTKGDEVMVLIPQLHRDKTIWGDDVEEFRPERFENPSAIPQHAFKPFGNGQRACIGQQFALHEATLVLGMMLKHFDFEDHTNYELVIKEKLTLKPEGFVVKAKSKGIPLGGIPSPSTEQSAKKVRKKAENAHNTPLLVLYGSNAGTAEGTARDLADIAMSKGFAPQVATLDSHAGNLPREGAVLIVTASYNGHPPDNAKQFVDWLDQASADEVKGVRYSVFGCGDKNWAATYQKVPAFIDETLAAKGAENIADRGEADASDDFEGTYEEWSDHMWSDVAAYFNLDIENSEDNKSTLSLQFVDSAADMPLAKMHGAFSTNVVASKELQQPGSARSTRHLEIELPKEASYQEGDHLGVIPRNYEGIVNRVTARFGLSASQQIRLEAEEEKLAHLPLAKTVSVEELLQYVELQDPVTRTQLRAMAAKTVCPPHKVELEALLEKQAYKEQVLAKRLTMLELLEKYPACEMKFSEFIALLPSIRPRYYSISSSPRVDEKQASITVSVVSGPAWSGYGEYKGIASNYLAELQEGDTITCFISTDQSEFTLPKDPETPLIMVGPGTGVAPFRGFVQARKQLKEQGQSLGEAHLYFGCRSPHEDYLYQEELENAQSEGIITLHTAFSRMPNQPKTYVQHVMEQDGKKLIELLDQGAHFYICGDGSQMAPAVEATLMKSYADVHQVSEADARLWLQQLEEKGRYAKDVWAG

SEQ ID NO: 251 - DNA, 3147 bp, synthetic construct
  misc_feature 1..3147: note = Variant of cytochrome P450
  source 1..3147: mol_type = other DNA
atgacaattaaggaaatgcctcagcctaagacgtttggagaacttaaaaatttaccgttattaaacacagataaaccggttcaagctttgatgcgtattgcggatgaattaggagaaatctttaaattcgaggcgcctggtagcgtaacgcgctttttatcaagtcagcgtctaattaaagaagcatgcgatgaatcacgctttgataaaaacttaagtcaaggccttaaatttgcacgtgatgtcctgggagacgccttatttacaagctggacgcatgaaccgaattggaaaaaagcgcataatatcttaggcccaagctttagtcagcgtgcaatgaaacgttatcatgcgatgatggtcgatatcgccgtgcagcttgttcaaaagtgggagcgtctaaatgcagatgagcatattgaagtatcggaagacatgacacgtttaacgctggatacaattggtctttgcggcttcaactatcgctttaacagcttttaccgagatcagcctcatccatttattgtgagtgccgtgcgtgcactggatgaagtaatgaacaagctgcagcgagcaaatccagacgacccagcttatgatgaaaacaagcgccagtgtcaagaaaacgcgaaggtgatcaacgactatgtcgataaaattattgcagatcgcaaagcaaggggtgaacaaagccatgatttattaacgcagatgctaaacggaaaagatccagaaacgggtgagccgcttgatgacgggaacattcgttatcaaattatcagtttcttaattgcgggacacgaaacaacaagtggtcttttatcatttgcgctgtatttcttagtgaaaaatccacatgtattacaaaaagtagcagaagaagcagcacgagttctagtagatcctgttccaagctacaaacaagtcaaacagcttaaatatgtcggcatggtcttaaacgaagcgctgcgcttatggccaactgctcctgcgttttccctatatgcaaaagaagatacggtgcttggaggagaatatcctttaaccaaaggcgacgaagtaatggttctgattcctcagcttcaccgtgataaaacaatttggggagacgatgtggaggagttccgtccagagcgttttgaaaatccaagtgcgattccgcagcatgcgtttaaaccgtttggaaacggtcagcgtgcgtgtatcggtcagcagttcgctcttcatgaagcaacgctggtacttggtatgatgctaaaacactttgactttgaagatcatacaaactacgagctcgttattaaagaaaagttaacgttaaaacctgaaggctttgtggtaaaagcaaaatcgaaaggcattccgcttggcggtattccttcacctagcactgaacagtctgctaaaaaagtacgcaaaaaggcagaaaacgctcataatacgccgctgcttgtgctatacggttcaaatgcgggaacagctgaaggaacggcgcgtgatttagcagatattgcaatgagcaaaggatttgcaccgcaggtcgcaacgcttgattcacacgccggaaatcttccgcgcgaaggagctgtattaattgtaacggcgtcttataacggtcatccgcctgataacgcaaagcaatttgtcgactggttagaccaagcgtctgctgatgaagtaaaaggcgttcgctactccgtatttggatgcggcgataaaaactgggctgcgacgtatcaaaaagtgcctgcttttatcgatgaaacgcttgccgctaaaggggcagaaaacatcgctgaccgcggtgaagcagatgcaagcgacgactttgaaggcacatatgaagaatggagtgatcatatgtggagtgacgtagcagcctactttaacctcgacattgaaaacagtgaagataataaatctactctttcacttcaatttgtcgacagcgccgcggatatgccgcttgcgaaaatgcacggtgcgttttcaacgaacgtcgtagcaagcaaagaacttcaacagccaggcagtgcacgaagcacgcgacatcttgaaattgaacttccaaaagaagcttcttatcaagaaggagatcatttaggtgttattcctcgcaactatgaaggaatagtaaaccgtgtaacagcaaggttcggcctaagcgcatcacagcaaatccgtctggaagcagaagaagaaaaattagctcatttgccactcgctaaaacagtatccgtagaagagcttctgcaatacgtggagcttcaagatcctgttacgcgcacgcagcttcgcgcaatggctgctaaaacggtctgcccgccgcataaagtagagcttgaagccttgcttgaaaagcaagcctacaaagaacaagtgctggcaaaacgtttaacaatgcttgaactgcttgaaaaatacccggcgtgtgaaatgaaattcagcgaatttatcgcccttctgccaagcatacgcccgcgctattactcgatttcttcatcacctcgtgtcgatgaaaaacaagcaagcatcacggtcagcgttgtctcaggaccggcgtggagcggatatggagaatataaaggaattgcgtcgaactatcttgccgagctgcaagaaggagatacgattacgtgctttatttccacagatcagtcagaatttacgctgccaaaagaccctgaaacgccgcttatcatggtcggaccgggaacaggcgtcgcgccgtttagaggctttgtgcaggcgcgcaaacagctaaaagaacaaggacagtcacttggagaagcacatttatacttcggctgccgttcacctcatgaagactatctgtatcaagaagagcttgaaaacgcccaaagcgaaggcatcattacgcttcataccgctttttctcgcatgccaaatcagccgaaaacatacgttcagcacgtaatggaacaagacggcaagaaattgattgaacttcttgatcaaggagcgcacttctatatttgcggagacggaagccaaatggcacctgccgttgaagcaacgcttatgaaaagctatgctgacgttcaccaagtgagtgaagcagacgctcgcttatggctgcagcagctagaagaaaaaggccgatacgcaaaagacgtgtgggctggg

SEQ ID NO: 252 - protein, 1049 aa, synthetic construct
  REGION 1..1049: note = Variant of cytochrome P450
MTIKEMPQPKTFGELKNLPLLNTDKPVQALMRIADELGEIFKFEAPGSVTRFLSSQRLIKEACDESRFDKNLSQGLKFARDVLGDALFTSWTHEPNWKKAHNILGPSFSQRAMKRYHAMMVDIAVQLVQKWERLNADEHIEVSEDMTRLTLDTIGLCGFNYRFNSFYRDQPHPFIVSAVRALDEVMNKLQRANPDDPAYDENKRQCQENAKVINDYVDKIIADRKARGEQSHDLLTQMLNGKDPETGEPLDDGNIRYQIISFLIAGHETTSGLLSFALYFLVKNPHVLQKVAEEAARVLVDPVPSYKQVKQLKYVGMVLNEALRLWPTAPAFSLYAKEDTVLGGEYPLTKGDEVMVLIPQLHRDKTIWGDDVEEFRPERFENPSAIPQHAFKPFGNGQRACIGQQFALHEATLVLGMMLKHFDFEDHTNYELVIKEKLTLKPEGFVVKAKSKGIPLGGIPSPSTEQSAKKVRKKAENAHNTPLLVLYGSNAGTAEGTARDLADIAMSKGFAPQVATLDSHAGNLPREGAVLIVTASYNGHPPDNAKQFVDWLDQASADEVKGVRYSVFGCGDKNWAATYQKVPAFIDETLAAKGAENIADRGEADASDDFEGTYEEWSDHMWSDVAAYFNLDIENSEDNKSTLSLQFVDSAADMPLAKMHGAFSTNVVASKELQQPGSARSTRHLEIELPKEASYQEGDHLGVIPRNYEGIVNRVTARFGLSASQQIRLEAEEEKLAHLPLAKTVSVEELLQYVELQDPVTRTQLRAMAAKTVCPPHKVELEALLEKQAYKEQVLAKRLTMLELLEKYPACEMKFSEFIALLPSIRPRYYSISSSPRVDEKQASITVSVVSGPAWSGYGEYKGIASNYLAELQEGDTITCFISTDQSEFTLPKDPETPLIMVGPGTGVAPFRGFVQARKQLKEQGQSLGEAHLYFGCRSPHEDYLYQEELENAQSEGIITLHTAFSRMPNQPKTYVQHVMEQDGKKLIELLDQGAHFYICGDGSQMAPAVEATLMKSYADVHQVSEADARLWLQQLEEKGRYAKDVWAG

SEQ ID NO: 253 - DNA, 3147 bp, synthetic construct
  misc_feature 1..3147: note = Variant of cytochrome P450
  source 1..3147: mol_type = other DNA
atgacaattaaggaaatgcctcagcctaagacgtttggagaacttaaaaatttaccgttattaaacacagataaaccggttcaagctttgatgcgtattgcggatgaattaggagagatctttaaattcgaggcgcctggtagcgtaacgcgctttttatcaagtcagcgtctaattaaagaagcatgcgatgaatcacgctttgataaaaacttaagtcaaggccttaaatttgcgcgtgattttcttggagacgggttatttacaagctggacgcatgaaccgaattggaaaaaagcgcataatatcttaggcccaagctttagtcagcgtgcaatgaaacgttatcatgcgatgatggtcgatatcgccgtgcagcttgttcaaaagtgggagcgtctaaatgcagatgagcatattgaagtatcggaagacatgacacgtttaacgctggatacaattggtctttgcggcttcaactatcgctttaacagcttttaccgagatcagcctcatccatttattgtgagtgtggtgcgtgcactggatgaagctatgaacaagctgcagcgagcaaatccagacgacccagcttatgatgaaaacaagcgccagtttcaagaagatatcaaggtgatgaacgacctggtcgataaaattattgcagatcgcaaagcaaggggtgaacaaagccatgatttattaacgcagatgctaaacggaaaagatccagaaacgggtgagccgcttgatgacgagaacattcgttatcaaattattacattcttaattgcgggacacgaaacaacaagtggtcttttatcatttgcgctgtatttcttagtgaaaaatccacatgtattacaaaaagtagcagaagaagcagcacgagttctagtagatcctgttccaagctacaaacaagtcaaacagcttaaatatgtcggcatggtcttaaacgaagcgctgcgcttatggccaactgctcctgcgttttccctatatgcaaaagaagatacggtgcttggaggagaatatcctttaaccaaaggcgacgaagtaatggttctgattcctcagcttcaccgtgataaaacaatttggggagacgatgtggaggagttccgtccagagcgttttgaaaatccaagtgcgattccgcagcatgcgtttaaaccgtttggaaacggtcagcgtgcgtgtatcggtcagcagttcgctcttcatgaagcaacgctggtacttggtatgatgctaaaacactttgactttgaagatcatacaaactacgagctcgttattaaagaaaagttaacgttaaaacctgaaggctttgtggtaaaagcaaaatcgaaaggcattccgcttggcggtattccttcacctagcactgaacagtctgctaaaaaagtacgcaaaaaggcagaaaacgctcataatacgccgctgcttgtgctatacggttcaaatgcgggaacagctgaaggaacggcgcgtgatttagcagatattgcaatgagcaaaggatttgcaccgcaggtcgcaacgcttgattcacacgccggaaatcttccgcgcgaaggagctgtattaattgtaacggcgtcttataacggtcatccgcctgataacgcaaagcaatttgtcgactggttagaccaagcgtctgctgatgaagtaaaaggcgttcgctactccgtatttggatgcggcgataaaaactgggctgcgacgtatcaaaaagtgcctgcttttatcgatgaaacgcttgccgctaaaggggcagaaaacatcgctgaccgcggtgaagcagatgcaagcgacgactttgaaggcacatatgaagaatggagtgatcatatgtggagtgacgtagcagcctactttaacctcgacattgaaaacagtgaagataataaatctactctttcacttcaatttgtcgacagcgccgcggatatgccgcttgcgaaaatgcacggtgcgttttcaacgaacgtcgtagcaagcaaagaacttcaacagccaggcagtgcacgaagcacgcgacatcttgaaattgaacttccaaaagaagcttcttatcaagaaggagatcatttaggtgttattcctcgcaactatgaaggaatagtaaaccgtgtaacagcaaggttcggcctaagcgcatcacagcaaatccgtctggaagcagaagaagaaaaattagctcatttgccactcgctaaaacagtatccgtagaagagcttctgcaatacgtggagcttcaagatcctgttacgcgcacgcagcttcgcgcaatggctgctaaaacggtctgcccgccgcataaagtagagcttgaagccttgcttgaaaagcaagcctacaaagaacaagtgctggcaaaacgtttaacaatgcttgaactgcttgaaaaatacccggcgtgtgaaatgaaattcagcgaatttatcgcccttctgccaagcatacgcccgcgctattactcgatttcttcatcacctcgtgtcgatgaaaaacaagcaagcatcacggtcagcgttgtctcaggaccggcgtggagcggatatggagaatataaaggaattgcgtcgaactatcttgccgagctgcaagaaggagatacgattacgtgctttatttccacagatcagtcagaatttacgctgccaaaagaccctgaaacgccgcttatcatggtcggaccgggaacaggcgtcgcgccgtttagaggctttgtgcaggcgcgcaaacagctaaaagaacaaggacagtcacttggagaagcacatttatacttcggctgccgttcacctcatgaagactatctgtatcaagaagagcttgaaaacgcccaaagcgaaggcatcattacgcttcataccgctttttctcgcatgccaaatcagccgaaaacatacgttcagcacgtaatggaacaagacggcaagaaattgattgaacttcttgatcaaggagcgcacttctatatttgcggagacggaagccaaatggcacctgccgttgaagcaacgcttatgaaaagctatgctgacgttcaccaagtgagtgaagcagacgctcgcttatggctgcagcagctagaagaaaaaggccgatacgcaaaagacgtgtgggctggg

SEQ ID NO: 254 - protein, 1049 aa, synthetic construct
  REGION 1..1049: note = Variant of cytochrome P450
MTIKEMPQPKTFGELKNLPLLNTDKPVQALMRIADELGEIFKFEAPGSVTRFLSSQRLIKEACDESRFDKNLSQGLKFARDFLGDGLFTSWTHEPNWKKAHNILGPSFSQRAMKRYHAMMVDIAVQLVQKWERLNADEHIEVSEDMTRLTLDTIGLCGFNYRFNSFYRDQPHPFIVSVVRALDEAMNKLQRANPDDPAYDENKRQFQEDIKVMNDLVDKIIADRKARGEQSHDLLTQMLNGKDPETGEPLDDENIRYQIITFLIAGHETTSGLLSFALYFLVKNPHVLQKVAEEAARVLVDPVPSYKQVKQLKYVGMVLNEALRLWPTAPAFSLYAKEDTVLGGEYPLTKGDEVMVLIPQLHRDKTIWGDDVEEFRPERFENPSAIPQHAFKPFGNGQRACIGQQFALHEATLVLGMMLKHFDFEDHTNYELVIKEKLTLKPEGFVVKAKSKGIPLGGIPSPSTEQSAKKVRKKAENAHNTPLLVLYGSNAGTAEGTARDLADIAMSKGFAPQVATLDSHAGNLPREGAVLIVTASYNGHPPDNAKQFVDWLDQASADEVKGVRYSVFGCGDKNWAATYQKVPAFIDETLAAKGAENIADRGEADASDDFEGTYEEWSDHMWSDVAAYFNLDIENSEDNKSTLSLQFVDSAADMPLAKMHGAFSTNVVASKELQQPGSARSTRHLEIELPKEASYQEGDHLGVIPRNYEGIVNRVTARFGLSASQQIRLEAEEEKLAHLPLAKTVSVEELLQYVELQDPVTRTQLRAMAAKTVCPPHKVELEALLEKQAYKEQVLAKRLTMLELLEKYPACEMKFSEFIALLPSIRPRYYSISSSPRVDEKQASITVSVVSGPAWSGYGEYKGIASNYLAELQEGDTITCFISTDQSEFTLPKDPETPLIMVGPGTGVAPFRGFVQARKQLKEQGQSLGEAHLYFGCRSPHEDYLYQEELENAQSEGIITLHTAFSRMPNQPKTYVQHVMEQDGKKLIELLDQGAHFYICGDGSQMAPAVEATLMKSYADVHQVSEADARLWLQQLEEKGRYAKDVWAG

SEQ ID NO: 255 - DNA, 3147 bp, synthetic construct
  misc_feature 1..3147: note = Variant of cytochrome P450
  source 1..3147: mol_type = other DNA
atgacaattaaggaaatgcctcagcctaagacgtttggagaacttaaaaatttaccgttattaaacacagataaaccggttcaagctttgatgcgtattgcggatgaattaggagagatctttaaattcgaggcgcctggtagcgtaacgcgctttgtgtcaggtcagcgtctaatcaaagaagcatgcgatgaatcacgctttgataaaaacttaagtcaaggccttaaatttgcgcgtgcctttcttggagacgggttatttacaagctggacgcatgaaccgaattggaaaaaagcgcataatatcttaggcccaagctttagtcagcgtgcaatgaaacgttatcatgcgatgatggtcgatatcgccgtgcagcttgttcaaaagtgggagcgtctaaatgcagatgagcatattgaagtatcggaagacatgacacgtttaacgctggatacaattggtctttgcggcttcaactatcgctttaacagcttttaccgagatcagcctcatccatttattgtgagtgttgtgcgtgcactggatgaagttatgaacaagctgcagcgagcaaatccagacgacccagcttatgatgaaaacaagcgccagtttcaagaagatatcaaggtgatgaacgactatgtcgataaaattattgcagatcgcaaagcaaggggtgaacaaagccatgatttattaacgcagatgctaaacggaaaagatccagaaacgggtgagccgcttgatgacgagaacattcgttatcaaattattacattcttaattgcgggacacgaaacaacaagtggtcttttatcatttgcgctgtatttcttagtgaaaaatccacatgtattacaaaaagtagcagaagaagcagcacgagttctagtagatcctgttccaagctacaaacaagtcaaacagcttaaatatgtcggcatggtcttaaacgaagcgctgcgcttatggccaactgctcctgcgttttccctatatgcaaaagaagatacggtgcttggaggagaatatcctttaaccaaaggcgacgaagtaatggttctgattcctcagcttcaccgtgataaaacaatttggggagacgatgtggaggagttccgtccagagcgttttgaaaatccaagtgcgattccgcagcatgcgtttaaaccgtttggaaacggtcagcgtgcgtgtatcggtcagcagttcgctcttcatgaagcaacgctggtacttggtatgatgctaaaacactttgactttgaagatcatacaaactacgagctcgttattaaagaaaagttaacgttaaaacctgaaggctttgtggtaaaagcaaaatcgaaaggcattccgcttggcggtattccttcacctagcactgaacagtctgctaaaaaagtacgcaaaaaggcagaaaacgctcataatacgccgctgcttgtgctatacggttcaaatgcgggaacagctgaaggaacggcgcgtgatttagcagatattgcaatgagcaaaggatttgcaccgcaggtcgcaacgcttgattcacacgccggaaatcttccgcgcgaaggagctgtattaattgtaacggcgtcttataacggtcatccgcctgataacgcaaagcaatttgtcgactggttagaccaagcgtctgctgatgaagtaaaaggcgttcgctactccgtatttggatgcggcgataaaaactgggctgcgacgtatcaaaaagtgcctgcttttatcgatgaaacgcttgccgctaaaggggcagaaaacatcgctgaccgcggtgaagcagatgcaagcgacgactttgaaggcacatatgaagaatggagtgatcatatgtggagtgacgtagcagcctactttaacctcgacattgaaaacagtgaagataataaatctactctttcacttcaatttgtcgacagcgccgcggatatgccgcttgcgaaaatgcacggtgcgttttcaacgaacgtcgtagcaagcaaagaacttcaacagccaggcagtgcacgaagcacgcgacatcttgaaattgaacttccaaaagaagcttcttatcaagaaggagatcatttaggtgttattcctcgcaactatgaaggaatagtaaaccgtgtaacagcaaggttcggcctaagcgcatcacagcaaatccgtctggaagcagaagaagaaaaattagctcatttgccactcgctaaaacagtatccgtagaagagcttctgcaatacgtggagcttcaagatcctgttacgcgcacgcagcttcgcgcaatggctgctaaaacggtctgcccgccgcataaagtagagcttgaagccttgcttgaaaagcaagcctacaaagaacaagtgctggcaaaacgtttaacaatgcttgaactgcttgaaaaatacccggcgtgtgaaatgaaattcagcgaatttatcgcccttctgccaagcatacgcccgcgctattactcgatttcttcatcacctcgtgtcgatgaaaaacaagcaagcatcacggtcagcgttgtctcaggaccggcgtggagcggatatggagaatataaaggaattgcgtcgaactatcttgccgagctgcaagaaggagatacgattacgtgctttatttccacagatcagtcagaatttacgctgccaaaagaccctgaaacgccgcttatcatggtcggaccgggaacaggcgtcgcgccgtttagaggctttgtgcaggcgcgcaaacagctaaaagaacaaggacagtcacttggagaagcacatttatacttcggctgccgttcacctcatgaagactatctgtatcaagaagagcttgaaaacgcccaaagcgaaggcatcattacgcttcataccgctttttctcgcatgccaaatcagccgaaaacatacgttcagcacgtaatggaacaagacggcaagaaattgattgaacttcttgatcaaggagcgcacttctatatttgcggagacggaagccaaatggcacctgccgttgaagcaacgcttatgaaaagctatgctgacgttcaccaagtgagtgaagcagacgctcgcttatggctgcagcagctagaagaaaaaggccgatacgcaaaagacgtgtgggctggg

SEQ ID NO: 256 - protein, 1049 aa, synthetic construct
  REGION 1..1049: note = Variant of cytochrome P450
MTIKEMPQPKTFGELKNLPLLNTDKPVQALMRIADELGEIFKFEAPGSVTRFVSGQRLIKEACDESRFDKNLSQGLKFARAFLGDGLFTSWTHEPNWKKAHNILGPSFSQRAMKRYHAMMVDIAVQLVQKWERLNADEHIEVSEDMTRLTLDTIGLCGFNYRFNSFYRDQPHPFIVSVVRALDEVMNKLQRANPDDPAYDENKRQFQEDIKVMNDYVDKIIADRKARGEQSHDLLTQMLNGKDPETGEPLDDENIRYQIITFLIAGHETTSGLLSFALYFLVKNPHVLQKVAEEAARVLVDPVPSYKQVKQLKYVGMVLNEALRLWPTAPAFSLYAKEDTVLGGEYPLTKGDEVMVLIPQLHRDKTIWGDDVEEFRPERFENPSAIPQHAFKPFGNGQRACIGQQFALHEATLVLGMMLKHFDFEDHTNYELVIKEKLTLKPEGFVVKAKSKGIPLGGIPSPSTEQSAKKVRKKAENAHNTPLLVLYGSNAGTAEGTARDLADIAMSKGFAPQVATLDSHAGNLPREGAVLIVTASYNGHPPDNAKQFVDWLDQASADEVKGVRYSVFGCGDKNWAATYQKVPAFIDETLAAKGAENIADRGEADASDDFEGTYEEWSDHMWSDVAAYFNLDIENSEDNKSTLSLQFVDSAADMPLAKMHGAFSTNVVASKELQQPGSARSTRHLEIELPKEASYQEGDHLGVIPRNYEGIVNRVTARFGLSASQQIRLEAEEEKLAHLPLAKTVSVEELLQYVELQDPVTRTQLRAMAAKTVCPPHKVELEALLEKQAYKEQVLAKRLTMLELLEKYPACEMKFSEFIALLPSIRPRYYSISSSPRVDEKQASITVSVVSGPAWSGYGEYKGIASNYLAELQEGDTITCFISTDQSEFTLPKDPETPLIMVGPGTGVAPFRGFVQARKQLKEQGQSLGEAHLYFGCRSPHEDYLYQEELENAQSEGIITLHTAFSRMPNQPKTYVQHVMEQDGKKLIELLDQGAHFYICGDGSQMAPAVEATLMKSYADVHQVSEADARLWLQQLEEKGRYAKDVWAG

SEQ ID NO: 257 - DNA, 3147 bp, synthetic construct
  misc_feature 1..3147: note = Variant of cytochrome P450
  source 1..3147: mol_type = other DNA
atgacaattaaggaaatgcctcagcctaagacgtttggagaacttaaaaatttaccgttattaaacacagataaaccggttcaagctttgatgcgtattgcggatgaattaggagaaatctttaaattcgaggcgcctggtagcgtaacgcgctttttatcaagtcagcgtctaattaaagaagcatgcgatgaatcacgctttgataaaaacttaagtcaaggcctgaaatttgggcgtgattttctgggagacgggttatttacaagctggacgcatgaaccgaattggaaaaaagcgcataatatcttaggcccaagctttagtcagcgtgcaatgaaacgttatcatgcgatgatggtcgatatcgccgtgcagcttgttcaaaagtgggagcgtctaaatgcagatgagcatattgaagtatcggaagacatgacacgtttaacgctggatacaattggtctttgcggcttcaactatcgctttaacagcttttaccgagatcagcctcatccatttattgtgagtgttgtgcgtgcactggatgaagtaatgaacaagctgcagcgagcaaatccagacgacccagcttatgatgaaaacaagcgccagtgtcaagaagatatcaaggtgatgaacgactatgtcgataaaattattgcagatcgcaaagcaaggggtgaacaaagccatgatttattaacgcagatgctaaacggaaaagatccagaaacgggtgagccgcttgatgacgggaacattcgttatcaaattattacattcttagtggcgggacacgatacaacaagtggtcttttatcatttgcgctgtatttcttagtgaaaaatccacatgtattacaaaaagtagcagaagaagcagcacgagttctagtagatcctgttccaagctacaaacaagtcaaacagcttaaatatgtcggcatggtcttaaacgaagcgctgcgcttatggccaactgttcctgcgttttccctatatgcaaaagaagatacggtgcttggaggagaatatcctttaaccaaaggcgacgaagtaatggttctgattcctcagcttcaccgtgataaaacaatttggggagacgatgtggaggagttccgtccagagcgttttgaaaatccaagtgcgattccgcagcatgcgtttaaaccgtttggaaacggtcagcgtgcgtgtatcggtcagcagttcgctcttcatgaagcaacgctggtacttggtatgatgctaaaacactttgactttgaagatcatacaaactacgagctcgttattaaagaaaagttaacgttaaaacctgaaggctttgtggtaaaagcaaaatcgaaaggcattccgcttggcggtattccttcacctagcactgaacagtctgctaaaaaagtacgcaaaaaggcagaaaacgctcataatacgccgctgcttgtgctatacggttcaaatgcgggaacagctgaaggaacggcgcgtgatttagcagatattgcaatgagcaaaggatttgcaccgcaggtcgcaacgcttgattcacacgccggaaatcttccgcgcgaaggagctgtattaattgtaacggcgtcttataacggtcatccgcctgataacgcaaagcaatttgtcgactggttagaccaagcgtctgctgatgaagtaaaaggcgttcgctactccgtatttggatgcggcgataaaaactgggctgcgacgtatcaaaaagtgcctgcttttatcgatgaaacgcttgccgctaaaggggcagaaaacatcgctgaccgcggtgaagcagatgcaagcgacgactttgaaggcacatatgaagaatggagtgatcatatgtggagtgacgtagcagcctactttaacctcgacattgaaaacagtgaagataataaatctactctttcacttcaatttgtcgacagcgccgcggatatgccgcttgcgaaaatgcacggtgcgttttcaacgaacgtcgtagcaagcaaagaacttcaacagccaggcagtgcacgaagcacgcgacatcttgaaattgaacttccaaaagaagcttcttatcaagaaggagatcatttaggtgttattcctcgcaactatgaaggaatagtaaaccgtgtaacagcaaggttcggcctaagcgcatcacagcaaatccgtctggaagcagaagaagaaaaattagctcatttgccactcgctaaaacagtatccgtagaagagcttctgcaatacgtggagcttcaagatcctgttacgcgcacgcagcttcgcgcaatggctgctaaaacggtctgcccgccgcataaagtagagcttgaagccttgcttgaaaagcaagcctacaaagaacaagtgctggcaaaacgtttaacaatgcttgaactgcttgaaaaatacccggcgtgtgaaatgaaattcagcgaatttatcgcccttctgccaagcatacgcccgcgctattactcgatttcttcatcacctcgtgtcgatgaaaaacaagcaagcatcacggtcagcgttgtctcaggaccggcgtggagcggatatggagaatataaaggaattgcgtcgaactatcttgccgagctgcaagaaggagatacgattacgtgctttatttccacagatcagtcagaatttacgctgccaaaagaccctgaaacgccgcttatcatggtcggaccgggaacaggcgtcgcgccgtttagaggctttgtgcaggcgcgcaaacagctaaaagaacaaggacagtcacttggagaagcacatttatacttcggctgccgttcacctcatgaagactatctgtatcaagaagagcttgaaaacgcccaaagcgaaggcatcattacgcttcataccgctttttctcgcatgccaaatcagccgaaaacatacgttcagcacgtaatggaacaagacggcaagaaattgattgaacttcttgatcaaggagcgcacttctatatttgcggagacggaagccaaatggcacctgccgttgaagcaacgcttatgaaaagctatgctgacgttcaccaagtgagtgaagcagacgctcgcttatggctgcagcagctagaagaaaaaggccgatacgcaaaagacgtgtgggctggg

SEQ ID NO: 258 - protein, 1049 aa, synthetic construct
  REGION 1..1049: note = Variant of cytochrome P450
MTIKEMPQPKTFGELKNLPLLNTDKPVQALMRIADELGEIFKFEAPGSVTRFLSSQRLIKEACDESRFDKNLSQGLKFGRDFLGDGLFTSWTHEPNWKKAHNILGPSFSQRAMKRYHAMMVDIAVQLVQKWERLNADEHIEVSEDMTRLTLDTIGLCGFNYRFNSFYRDQPHPFIVSVVRALDEVMNKLQRANPDDPAYDENKRQCQEDIKVMNDYVDKIIADRKARGEQSHDLLTQMLNGKDPETGEPLDDGNIRYQIITFLVAGHDTTSGLLSFALYFLVKNPHVLQKVAEEAARVLVDPVPSYKQVKQLKYVGMVLNEALRLWPTVPAFSLYAKEDTVLGGEYPLTKGDEVMVLIPQLHRDKTIWGDDVEEFRPERFENPSAIPQHAFKPFGNGQRACIGQQFALHEATLVLGMMLKHFDFEDHTNYELVIKEKLTLKPEGFVVKAKSKGIPLGGIPSPSTEQSAKKVRKKAENAHNTPLLVLYGSNAGTAEGTARDLADIAMSKGFAPQVATLDSHAGNLPREGAVLIVTASYNGHPPDNAKQFVDWLDQASADEVKGVRYSVFGCGDKNWAATYQKVPAFIDETLAAKGAENIADRGEADASDDFEGTYEEWSDHMWSDVAAYFNLDIENSEDNKSTLSLQFVDSAADMPLAKMHGAFSTNVVASKELQQPGSARSTRHLEIELPKEASYQEGDHLGVIPRNYEGIVNRVTARFGLSASQQIRLEAEEEKLAHLPLAKTVSVEELLQYVELQDPVTRTQLRAMAAKTVCPPHKVELEALLEKQAYKEQVLAKRLTMLELLEKYPACEMKFSEFIALLPSIRPRYYSISSSPRVDEKQASITVSVVSGPAWSGYGEYKGIASNYLAELQEGDTITCFISTDQSEFTLPKDPETPLIMVGPGTGVAPFRGFVQARKQLKEQGQSLGEAHLYFGCRSPHEDYLYQEELENAQSEGIITLHTAFSRMPNQPKTYVQHVMEQDGKKLIELLDQGAHFYICGDGSQMAPAVEATLMKSYADVHQVSEADARLWLQQLEEKGRYAKDVWAG

SEQ ID NO: 259 - DNA, 3147 bp, synthetic construct
  misc_feature 1..3147: note = Variant of cytochrome P450
  source 1..3147: mol_type = other DNA
atgacaattaaggaaatgcctcagcctaagacgtttggagaacttaaaaatttaccgttattaaacacagataaaccggttcaagctttgatgcgtattgcggatgaattaggagaaatctttaaattcgaggcgcctggtagcgtaacgcgctttctgtcaggtcagcgtctagtcaaagaagcatgcgatgaatcacgctttgataaaaacttaagtcaaggccttaaatttgcacgtgattttcttggagacgggttatttacaagctggacgcatgaaccgaattggaaaaaagcgcataatatcttaggcccaagctttagtcagcgtgcaatgaaacgttatcatgcgatgatggtcgatatcgccgtgcagcttgttcaaaagtgggagcgtctaaatgcagatgagcatattgaagtatcggaagacatgacacgtttaacgctggatacaattggtctttgcggcttcaactatcgctttaacagcttttaccgagatcagcctcatccatttattgtgagtgtggtgcgtgcactggatgaagtaatgaacaagctgcagcgagcaaatccagacgacccagcttatgatgaaaacaagcgccagtgtcaagaagatatcaaggtgatgaacgactatgtcgataaaattattgcagatcgcaaagcaaggggtgaacaaagccatgatttattaacgcagatgctaaacggaaaagatccagaaacgggtgagccgcttgatgacgggaacattcgttatcaaattattacattcttaattgcgggacacgaaacaacaagtggtcttttatcatttgcgctgtatttcttagtgaaaaatccacatgtattacaaaaagtagcagaagaagcagcacgagttctagtagatcctgttccaagctacaaacaagtcaaacagcttaaatatgtcggcatggtcttaaacgaagcgctgcgcttatggccaactgctcctgcgttttccctatatgcaaaagaagatacggtgcttggaggagaatatcctttaaccaaaggcgacgaagtaatggttctgattcctcagcttcaccgtgataaaacaatttggggagacgatgtggaggagttccgtccagagcgttttgaaaatccaagtgcgattccgcagcatgcgtttaaaccgtttggaaacggtcagcgtgcgtgtatcggtcagcagttcgctcttcatgaagcaacgctggtacttggtatgatgctaaaacactttgactttgaagatcatacaaactacgagctcgttattaaagaaaagttaacgttaaaacctgaaggctttgtggtaaaagcaaaatcgaaaggcattccgcttggcggtattccttcacctagcactgaacagtctgctaaaaaagtacgcaaaaaggcagaaaacgctcataatacgccgctgcttgtgctatacggttcaaatgcgggaacagctgaaggaacggcgcgtgatttagcagatattgcaatgagcaaaggatttgcaccgcaggtcgcaacgcttgattcacacgccggaaatcttccgcgcgaaggagctgtattaattgtaacggcgtcttataacggtcatccgcctgataacgcaaagcaatttgtcgactggttagaccaagcgtctgctgatgaagtaaaaggcgttcgctactccgtatttggatgcggcgataaaaactgggctgcgacgtatcaaaaagtgcctgcttttatcgatgaaacgcttgccgctaaaggggcagaaaacatcgctgaccgcggtgaagcagatgcaagcgacgactttgaaggcacatatgaagaatggagtgatcatatgtggagtgacgtagcagcctactttaacctcgacattgaaaacagtgaagataataaatctactctttcacttcaatttgtcgacagcgccgcggatatgccgcttgcgaaaatgcacggtgcgttttcaacgaacgtcgtagcaagcaaagaacttcaacagccaggcagtgcacgaagcacgcgacatcttgaaattgaacttccaaaagaagcttcttatcaagaaggagatcatttaggtgttattcctcgcaactatgaaggaatagtaaaccgtgtaacagcaaggttcggcctaagcgcatcacagcaaatccgtctggaagcagaagaagaaaaattagctcatttgccactcgctaaaacagtatccgtagaagagcttctgcaatacgtggagcttcaagatcctgttacgcgcacgcagcttcgcgcaatggctgctaaaacggtctgcccgccgcataaagtagagcttgaagccttgcttgaaaagcaagcctacaaagaacaagtgctggcaaaacgtttaacaatgcttgaactgcttgaaaaatacccggcgtgtgaaatgaaattcagcgaatttatcgcccttctgccaagcatacgcccgcgctattactcgatttcttcatcacctcgtgtcgatgaaaaacaagcaagcatcacggtcagcgttgtctcaggaccggcgtggagcggatatggagaatataaaggaattgcgtcgaactatcttgccgagctgcaagaaggagatacgattacgtgctttatttccacagatcagtcagaatttacgctgccaaaagaccctgaaacgccgcttatcatggtcggaccgggaacaggcgtcgcgccgtttagaggctttgtgcaggcgcgcaaacagctaaaagaacaaggacagtcacttggagaagcacatttatacttcggctgccgttcacctcatgaagactatctgtatcaagaagagcttgaaaacgcccaaagcgaaggcatcattacgcttcataccgctttttctcgcatgccaaatcagccgaaaacatacgttcagcacgtaatggaacaagacggcaagaaattgattgaacttcttgatcaaggagcgcacttctatatttgcggagacggaagccaaatggcacctgccgttgaagcaacgcttatgaaaagctatgctgacgttcaccaagtgagtgaagcagacgctcgcttatggctgcagcagctagaagaaaaaggccgatacgcaaaagacgtgtgggctggg

SEQ ID NO: 260 - protein, 1049 aa, synthetic construct
  REGION 1..1049: note = Variant of cytochrome P450
MTIKEMPQPKTFGELKNLPLLNTDKPVQALMRIADELGEIFKFEAPGSVTRFLSGQRLVKEACDESRFDKNLSQGLKFARDFLGDGLFTSWTHEPNWKKAHNILGPSFSQRAMKRYHAMMVDIAVQLVQKWERLNADEHIEVSEDMTRLTLDTIGLCGFNYRFNSFYRDQPHPFIVSVVRALDEVMNKLQRANPDDPAYDENKRQCQEDIKVMNDYVDKIIADRKARGEQSHDLLTQMLNGKDPETGEPLDDGNIRYQIITFLIAGHETTSGLLSFALYFLVKNPHVLQKVAEEAARVLVDPVPSYKQVKQLKYVGMVLNEALRLWPTAPAFSLYAKEDTVLGGEYPLTKGDEVMVLIPQLHRDKTIWGDDVEEFRPERFENPSAIPQHAFKPFGNGQRACIGQQFALHEATLVLGMMLKHFDFEDHTNYELVIKEKLTLKPEGFVVKAKSKGIPLGGIPSPSTEQSAKKVRKKAENAHNTPLLVLYGSNAGTAEGTARDLADIAMSKGFAPQVATLDSHAGNLPREGAVLIVTASYNGHPPDNAKQFVDWLDQASADEVKGVRYSVFGCGDKNWAATYQKVPAFIDETLAAKGAENIADRGEADASDDFEGTYEEWSDHMWSDVAAYFNLDIENSEDNKSTLSLQFVDSAADMPLAKMHGAFSTNVVASKELQQPGSARSTRHLEIELPKEASYQEGDHLGVIPRNYEGIVNRVTARFGLSASQQIRLEAEEEKLAHLPLAKTVSVEELLQYVELQDPVTRTQLRAMAAKTVCPPHKVELEALLEKQAYKEQVLAKRLTMLELLEKYPACEMKFSEFIALLPSIRPRYYSISSSPRVDEKQASITVSVVSGPAWSGYGEYKGIASNYLAELQEGDTITCFISTDQSEFTLPKDPETPLIMVGPGTGVAPFRGFVQARKQLKEQGQSLGEAHLYFGCRSPHEDYLYQEELENAQSEGIITLHTAFSRMPNQPKTYVQHVMEQDGKKLIELLDQGAHFYICGDGSQMAPAVEATLMKSYADVHQVSEADARLWLQQLEEKGRYAKDVWAG

SEQ ID NO: 261 - DNA, 3147 bp, synthetic construct
  misc_feature 1..3147: note = Variant of cytochrome P450
  source 1..3147: mol_type = other DNA
atgacaattaaggaaatgcctcagcctaagacgtttggagaacttaaaaatttaccgttattaaacacagataaaccggttcaagctttgatgcgtattgcggatgaattaggaccgatctttaaattcgaggcgcctggtagcgtaacgcgctttgtgtcaggtcagcgtctaatcaaagaagcatgcgatgaatcacgctttgataaaaacttaagtcaaggccttaaatttgcgcgtgcctttcttggagacgggttatttacaagctggacgcatgaaccgaattggaaaaaagcgcataatatcttaggcccaagctttagtcagcgtgcaatgaaacgttatcatgcgatgatggtcgatatcgccgtgcagcttgttcaaaagtgggagcgtctaaatgcagatgagcatattgaagtatcggaagacatgacacgtttaacgctggatacaattggtctttgcggcttcaactatcgctttaacagcttttaccgagatcagcctcatccatttattgtgagtgttgtgcgtgcactggatgaagttatgaacaagctgcagcgagcaaatccagacgacccagcttatgatgaaaacaagcgccagtgtcaagaagatatcaaggtgatgaacgacctggtcgataaaattattgcagatcgcaaagcaaggggtgaacaaagccatgatttattaacgcagatgctaaacggaaaagatccagaaacgggtgagccgcttgatgacgagaacattcgttatcaaattattacattcttaattgcgggacacgaaacaacaagtggtcttttatcatttgcgctgtatttcttagtgaaaaatccacatgtattacaaaaagtagcagaagaagcagcacgagttctagtagatcctgttccaagctacaaacaagtcaaacagcttaaatatgtcggcatggtcttaaacgaagcgctgcgcttatggccaactgctcctgcgttttccctatatgcaaaagaagatacggtgcttggaggagaatatcctttaaccaaaggcgacgaagtaatggttctgattcctcagcttcaccgtgataaaacaatttggggagacgatgtggaggagttccgtccagagcgttttgaaaatccaagtgcgattccgcagcatgcgtttaaaccgtttggaaacggtcagcgtgcgtgtatcggtcagcagttcgctcttcatgaagcaacgctggtacttggtatgatgctaaaacactttgactttgaagatcatacaaactacgagctcgttattaaagaaaagttaacgttaaaacctgaaggctttgtggtaaaagcaaaatcgaaaggcattccgcttggcggtattccttcacctagcactgaacagtctgctaaaaaagtacgcaaaaaggcagaaaacgctcataatacgccgctgcttgtgctatacggttcaaatgcgggaacagctgaaggaacggcgcgtgatttagcagatattgcaatgagcaaaggatttgcaccgcaggtcgcaacgcttgattcacacgccggaaatcttccgcgcgaaggagctgtattaattgtaacggcgtcttataacggtcatccgcctgataacgcaaagcaatttgtcgactggttagaccaagcgtctgctgatgaagtaaaaggcgttcgctactccgtatttggatgcggcgataaaaactgggctgcgacgtatcaaaaagtgcctgcttttatcgatgaaacgcttgccgctaaaggggcagaaaacatcgctgaccgcggtgaagcagatgcaagcgacgactttgaaggcacatatgaagaatggagtgatcatatgtggagtgacgtagcagcctactttaacctcgacattgaaaacagtgaagataataaatctactctttcacttcaatttgtcgacagcgccgcggatatgccgcttgcgaaaatgcacggtgcgttttcaacgaacgtcgtagcaagcaaagaacttcaacagccaggcagtgcacgaagcacgcgacatcttgaaattgaacttccaaaagaagcttcttatcaagaaggagatcatttaggtgttattcctcgcaactatgaaggaatagtaaaccgtgtaacagcaaggttcggcctaagcgcatcacagcaaatccgtctggaagcagaagaagaaaaattagctcatttgccactcgctaaaacagtatccgtagaagagcttctgcaatacgtggagcttcaagatcctgttacgcgcacgcagcttcgcgcaatggctgctaaaacggtctgcccgccgcataaagtagagcttgaagccttgcttgaaaagcaagcctacaaagaacaagtgctggcaaaacgtttaacaatgcttgaactgcttgaaaaatacccggcgtgtgaaatgaaattcagcgaatttatcgcccttctgccaagcatacgcccgcgctattactcgatttcttcatcacctcgtgtcgatgaaaaacaagcaagcatcacggtcagcgttgtctcaggaccggcgtggagcggatatggagaatataaaggaattgcgtcgaactatcttgccgagctgcaagaaggagatacgattacgtgctttatttccacagatcagtcagaatttacgctgccaaaagaccctgaaacgccgcttatcatggtcggaccgggaacaggcgtcgcgccgtttagaggctttgtgcaggcgcgcaaacagctaaaagaacaaggacagtcacttggagaagcacatttatacttcggctgccgttcacctcatgaagactatctgtatcaagaagagcttgaaaacgcccaaagcgaaggcatcattacgcttcataccgctttttctcgcatgccaaatcagccgaaaacatacgttcagcacgtaatggaacaagacggcaagaaattgattgaacttcttgatcaaggagcgcacttctatatttgcggagacggaagccaaatggcacctgccgttgaagcaacgcttatgaaaagctatgctgacgttcaccaagtgagtgaagcagacgctcgcttatggctgcagcagctagaagaaaaaggccgatacgcaaaagacgtgtgggctggg

SEQ ID NO: 262 - protein, 1049 aa, synthetic construct
  REGION 1..1049: note = Variant of cytochrome P450
MTIKEMPQPKTFGELKNLPLLNTDKPVQALMRIADELGPIFKFEAPGSVTRFVSGQRLIKEACDESRFDKNLSQGLKFARAFLGDGLFTSWTHEPNWKKAHNILGPSFSQRAMKRYHAMMVDIAVQLVQKWERLNADEHIEVSEDMTRLTLDTIGLCGFNYRFNSFYRDQPHPFIVSVVRALDEVMNKLQRANPDDPAYDENKRQCQEDIKVMNDLVDKIIADRKARGEQSHDLLTQMLNGKDPETGEPLDDENIRYQIITFLIAGHETTSGLLSFALYFLVKNPHVLQKVAEEAARVLVDPVPSYKQVKQLKYVGMVLNEALRLWPTAPAFSLYAKEDTVLGGEYPLTKGDEVMVLIPQLHRDKTIWGDDVEEFRPERFENPSAIPQHAFKPFGNGQRACIGQQFALHEATLVLGMMLKHFDFEDHTNYELVIKEKLTLKPEGFVVKAKSKGIPLGGIPSPSTEQSAKKVRKKAENAHNTPLLVLYGSNAGTAEGTARDLADIAMSKGFAPQVATLDSHAGNLPREGAVLIVTASYNGHPPDNAKQFVDWLDQASADEVKGVRYSVFGCGDKNWAATYQKVPAFIDETLAAKGAENIADRGEADASDDFEGTYEEWSDHMWSDVAAYFNLDIENSEDNKSTLSLQFVDSAADMPLAKMHGAFSTNVVASKELQQPGSARSTRHLEIELPKEASYQEGDHLGVIPRNYEGIVNRVTARFGLSASQQIRLEAEEEKLAHLPLAKTVSVEELLQYVELQDPVTRTQLRAMAAKTVCPPHKVELEALLEKQAYKEQVLAKRLTMLELLEKYPACEMKFSEFIALLPSIRPRYYSISSSPRVDEKQASITVSVVSGPAWSGYGEYKGIASNYLAELQEGDTITCFISTDQSEFTLPKDPETPLIMVGPGTGVAPFRGFVQARKQLKEQGQSLGEAHLYFGCRSPHEDYLYQEELENAQSEGIITLHTAFSRMPNQPKTYVQHVMEQDGKKLIELLDQGAHFYICGDGSQMAPAVEATLMKSYADVHQVSEADARLWLQQLEEKGRYAKDVWAG

SEQ ID NO: 263 - DNA, 3147 bp, synthetic construct
  misc_feature 1..3147: note = Variant of cytochrome P450
  source 1..3147: mol_type = other DNA
atgacaattaaggaaatgcctcagcctaagacgtttggagaacttaaaaatttaccgttattaaacacagataaaccggttcaagctttgatgcgtattgcggatgaattaggagaaatctttaaattcgaggcgcctggtagcgtaacgcgctttttatcaagtcagcgtctaattaaagaagcatgcgatgaatcacgctttgataaaaacttaagtcaaggccttaaatttgcacgtgatttcgccggagacggcttatttacaagctggacgcatgaaccgaattggaaaaaagcgcataatatcttaggcccaagctttagtcagcgtgcaatgaaacgttatcatgcgatgatggtcgatatcgccgtgcagcttgttcaaaagtgggagcgtctaaatgcagatgagcatattgaagtatcggaagacatgacacgtttaacgctggatacaattggtctttgcggcttcaactatcgctttaacagcttttaccgagatcagcctcatccatttattgtgagtgccgtgcgtgcactggatgaagtaatgaacaagctgcagcgagcaaatccagacgacccagcttatgatgaaaacaagcgccagtgtcaagaagacgttaaggtgatgaacgactatgtcgataaaattattgcagatcgcaaagcaaggggtgaacaaagccatgatttattaacgcagatgctaaacggaaaagatccagaaacgggtgagccgcttgatgacgggaacattcgttatcaaattattacattcttaattgcgggacacgaaacaacaagtggtcttttatcatttgcgctgtatttcttagtgaaaaatccacatgtattacaaaaagtagcagaagaagcagcacgagttctagtagatcctgttccaagctacaaacaagtcaaacagcttaaatatgtcggcatggtcttaaacgaagcgctgcgcttatggccaactgctcctgcgttttccctatatgcaaaagaagatacggtgcttggaggagaatatcctttaaccaaaggcgacgaagtaatggttctgattcctcagcttcaccgtgataaaacaatttggggagacgatgtggaggagttccgtccagagcgttttgaaaatccaagtgcgattccgcagcatgcgtttaaaccgtttggaaacggtcagcgtgcgtgtatcggtcagcagttcgctcttcatgaagcaacgctggtacttggtatgatgctaaaacactttgactttgaagatcatacaaactacgagctcgttattaaagaaaagttaacgttaaaacctgaaggctttgtggtaaaagcaaaatcgaaaggcattccgcttggcggtattccttcacctagcactgaacagtctgctaaaaaagtacgcaaaaaggcagaaaacgctcataatacgccgctgcttgtgctatacggttcaaatgcgggaacagctgaaggaacggcgcgtgatttagcagatattgcaatgagcaaaggatttgcaccgcaggtcgcaacgcttgattcacacgccggaaatcttccgcgcgaaggagctgtattaattgtaacggcgtcttataacggtcatccgcctgataacgcaaagcaatttgtcgactggttagaccaagcgtctgctgatgaagtaaaaggcgttcgctactccgtatttggatgcggcgataaaaactgggctgcgacgtatcaaaaagtgcctgcttttatcgatgaaacgcttgccgctaaaggggcagaaaacatcgctgaccgcggtgaagcagatgcaagcgacgactttgaaggcacatatgaagaatggagtgatcatatgtggagtgacgtagcagcctactttaacctcgacattgaaaacagtgaagataataaatctactctttcacttcaatttgtcgacagcgccgcggatatgccgcttgcgaaaatgcacggtgcgttttcaacgaacgtcgtagcaagcaaagaacttcaacagccaggcagtgcacgaagcacgcgacatcttgaaattgaacttccaaaagaagcttcttatcaagaaggagatcatttaggtgttattcctcgcaactatgaaggaatagtaaaccgtgtaacagcaaggttcggcctaagcgcatcacagcaaatccgtctggaagcagaagaagaaaaattagctcatttgccactcgctaaaacagtatccgtagaagagcttctgcaatacgtggagcttcaagatcctgttacgcgcacgcagcttcgcgcaatggctgctaaaacggtctgcccgccgcataaagtagagcttgaagccttgcttgaaaagcaagcctacaaagaacaagtgctggcaaaacgtttaacaatgcttgaactgcttgaaaaatacccggcgtgtgaaatgaaattcagcgaatttatcgcccttctgccaagcatacgcccgcgctattactcgatttcttcatcacctcgtgtcgatgaaaaacaagcaagcatcacggtcagcgttgtctcaggaccggcgtggagcggatatggagaatataaaggaattgcgtcgaactatcttgccgagctgcaagaaggagatacgattacgtgctttatttccacagatcagtcagaatttacgctgccaaaagaccctgaaacgccgcttatcatggtcggaccgggaacaggcgtcgcgccgtttagaggctttgtgcaggcgcgcaaacagctaaaagaacaaggacagtcacttggagaagcacatttatacttcggctgccgttcacctcatgaagactatctgtatcaagaagagcttgaaaacgcccaaagcgaaggcatcattacgcttcataccgctttttctcgcatgccaaatcagccgaaaacatacgttcagcacgtaatggaacaagacggcaagaaattgattgaacttcttgatcaaggagcgcacttctatatttgcggagacggaagccaaatggcacctgccgttgaagcaacgcttatgaaaagctatgctgacgttcaccaagtgagtgaagcagacgctcgcttatggctgcagcagctagaagaaaaaggccgatacgcaaaagacgtgtgggctggg

SEQ ID NO: 264 - protein, 1049 aa, synthetic construct
  REGION 1..1049: note = Variant of cytochrome P450
MTIKEMPQPKTFGELKNLPLLNTDKPVQALMRIADELGEIFKFEAPGSVTRFLSSQRLIKEACDESRFDKNLSQGLKFARDFAGDGLFTSWTHEPNWKKAHNILGPSFSQRAMKRYHAMMVDIAVQLVQKWERLNADEHIEVSEDMTRLTLDTIGLCGFNYRFNSFYRDQPHPFIVSAVRALDEVMNKLQRANPDDPAYDENKRQCQEDVKVMNDYVDKIIADRKARGEQSHDLLTQMLNGKDPETGEPLDDGNIRYQIITFLIAGHETTSGLLSFALYFLVKNPHVLQKVAEEAARVLVDPVPSYKQVKQLKYVGMVLNEALRLWPTAPAFSLYAKEDTVLGGEYPLTKGDEVMVLIPQLHRDKTIWGDDVEEFRPERFENPSAIPQHAFKPFGNGQRACIGQQFALHEATLVLGMMLKHFDFEDHTNYELVIKEKLTLKPEGFVVKAKSKGIPLGGIPSPSTEQSAKKVRKKAENAHNTPLLVLYGSNAGTAEGTARDLADIAMSKGFAPQVATLDSHAGNLPREGAVLIVTASYNGHPPDNAKQFVDWLDQASADEVKGVRYSVFGCGDKNWAATYQKVPAFIDETLAAKGAENIADRGEADASDDFEGTYEEWSDHMWSDVAAYFNLDIENSEDNKSTLSLQFVDSAADMPLAKMHGAFSTNVVASKELQQPGSARSTRHLEIELPKEASYQEGDHLGVIPRNYEGIVNRVTARFGLSASQQIRLEAEEEKLAHLPLAKTVSVEELLQYVELQDPVTRTQLRAMAAKTVCPPHKVELEALLEKQAYKEQVLAKRLTMLELLEKYPACEMKFSEFIALLPSIRPRYYSISSSPRVDEKQASITVSVVSGPAWSGYGEYKGIASNYLAELQEGDTITCFISTDQSEFTLPKDPETPLIMVGPGTGVAPFRGFVQARKQLKEQGQSLGEAHLYFGCRSPHEDYLYQEELENAQSEGIITLHTAFSRMPNQPKTYVQHVMEQDGKKLIELLDQGAHFYICGDGSQMAPAVEATLMKSYADVHQVSEADARLWLQQLEEKGRYAKDVWAG

SEQ ID NO: 265 - DNA, 3147 bp, synthetic construct
  misc_feature 1..3147: note = Variant of cytochrome P450
  source 1..3147: mol_type = other DNA
atgacaattaaggaaatgcctcagcctaagacgtttggagaacttaaaaatttaccgttattaaacacagataaaccggttcaagctttgatgcgtattgcggatgaattaggagaaatctttaaattcgaggcgcctggtagcgtaacgcgctttttatcaagtcagcgtctaattaaagaagcatgcgatgaatcacgctttgataaaaacttaagtcaaggccttaaatttgcacgtgattttcttggagacgggttatttacaagctggacgcatgaaccgaattggaaaaaagcgcataatatcttaggcccaagctttagtcagcgtgcaatgaaacgttatcatgcgatgatggtcgatatcgccgtgcagcttgttcaaaagtgggagcgtctaaatgcagatgagcatattgaagtatcggaagacatgacacgtttaacgctggatacaattggtctttgcggcttcaactatcgctttaacagcttttaccgagatcagcctcatccatttattgtgagtgttgtgcgtgcactggatgaagtaatgaacaagctgcagcgagcaaatccagacgacccagcttatgatgaaaacaagcgccagtgtcaagaagacgcgaaggtgctgaacgactatgtcgataaaattattgcagatcgcaaagcaaggggtgaacaaagccatgatttattaacgcagatgctaaacggaaaagatccagaaacgggtgagccgcttgatgacgggaacattcgttatcaaattattacattcttaattgcgggacacgaaacaacaagtggtcttttatcatttgcgctgtatttcttagtgaaaaatccacatgtattacaaaaagtagcagaagaagcagcacgagttctagtagatcctgttccaagctacaaacaagtcaaacagcttaaatatgtcggcatggtcttaaacgaagcgctgcgcttatggccaactgctcctgcgttttccctatatgcaaaagaagatacggtgcttggaggagaatatcctttaaccaaaggcgacgaagtaatggttctgattcctcagcttcaccgtgataaaacaatttggggagacgatgtggaggagttccgtccagagcgttttgaaaatccaagtgcgattccgcagcatgcgtttaaaccgtttggaaacggtcagcgtgcgtgtatcggtcagcagttcgctcttcatgaagcaacgctggtacttggtatgatgctaaaacactttgactttgaagatcatacaaactacgagctcgttattaaagaaaagttaacgttaaaacctgaaggctttgtggtaaaagcaaaatcgaaaggcattccgcttggcggtattccttcacctagcactgaacagtctgctaaaaaagtacgcaaaaaggcagaaaacgctcataatacgccgctgcttgtgctatacggttcaaatgcgggaacagctgaaggaacggcgcgtgatttagcagatattgcaatgagcaaaggatttgcaccgcaggtcgcaacgcttgattcacacgccggaaatcttccgcgcgaaggagctgtattaattgtaacggcgtcttataacggtcatccgcctgataacgcaaagcaatttgtcgactggttagaccaagcgtctgctgatgaagtaaaaggcgttcgctactccgtatttggatgcggcgataaaaactgggctgcgacgtatcaaaaagtgcctgcttttatcgatgaaacgcttgccgctaaaggggcagaaaacatcgctgaccgcggtgaagcagatgcaagcgacgactttgaaggcacatatgaagaatggagtgatcatatgtggagtgacgtagcagcctactttaacctcgacattgaaaacagtgaagataataaatctactctttcacttcaatttgtcgacagcgccgcggatatgccgcttgcgaaaatgcacggtgcgttttcaacgaacgtcgtagcaagcaaagaacttcaacagccaggcagtgcacgaagcacgcgacatcttgaaattgaacttccaaaagaagcttcttatcaagaaggagatcatttaggtgttattcctcgcaactatgaaggaatagtaaaccgtgtaacagcaaggttcggcctaagcgcatcacagcaaatccgtctggaagcagaagaagaaaaattagctcatttgccactcgctaaaacagtatccgtagaagagcttctgcaatacgtggagcttcaagatcctgttacgcgcacgcagcttcgcgcaatggctgctaaaacggtctgcccgccgcataaagtagagcttgaagccttgcttgaaaagcaagcctacaaagaacaagtgctggcaaaacgtttaacaatgcttgaactgcttgaaaaatacccggcgtgtgaaatgaaattcagcgaatttatcgcccttctgccaagcatacgcccgcgctattactcgatttcttcatcacctcgtgtcgatgaaaaacaagcaagcatcacggtcagcgttgtctcaggaccggcgtggagcggatatggagaatataaaggaattgcgtcgaactatcttgccgagctgcaagaaggagatacgattacgtgctttatttccacagatcagtcagaatttacgctgccaaaagaccctgaaacgccgcttatcatggtcggaccgggaacaggcgtcgcgccgtttagaggctttgtgcaggcgcgcaaacagctaaaagaacaaggacagtcacttggagaagcacatttatacttcggctgccgttcacctcatgaagactatctgtatcaagaagagcttgaaaacgcccaaagcgaaggcatcattacgcttcataccgctttttctcgcatgccaaatcagccgaaaacatacgttcagcacgtaatggaacaagacggcaagaaattgattgaacttcttgatcaaggagcgcacttctatatttgcggagacggaagccaaatggcacctgccgttgaagcaacgcttatgaaaagctatgctgacgttcaccaagtgagtgaagcagacgctcgcttatggctgcagcagctagaagaaaaaggccgatacgcaaaagacgtgtgggctggg

SEQ ID NO: 266 - protein, 1049 aa, synthetic construct
  REGION 1..1049: note = Variant of cytochrome P450
MTIKEMPQPKTFGELKNLPLLNTDKPVQALMRIADELGEIFKFEAPGSVTRFLSSQRLIKEACDESRFDKNLSQGLKFARDFLGDGLFTSWTHEPNWKKAHNILGPSFSQRAMKRYHAMMVDIAVQLVQKWERLNADEHIEVSEDMTRLTLDTIGLCGFNYRFNSFYRDQPHPFIVSVVRALDEVMNKLQRANPDDPAYDENKRQCQEDAKVLNDYVDKIIADRKARGEQSHDLLTQMLNGKDPETGEPLDDGNIRYQIITFLIAGHETTSGLLSFALYFLVKNPHVLQKVAEEAARVLVDPVPSYKQVKQLKYVGMVLNEALRLWPTAPAFSLYAKEDTVLGGEYPLTKGDEVMVLIPQLHRDKTIWGDDVEEFRPERFENPSAIPQHAFKPFGNGQRACIGQQFALHEATLVLGMMLKHFDFEDHTNYELVIKEKLTLKPEGFVVKAKSKGIPLGGIPSPSTEQSAKKVRKKAENAHNTPLLVLYGSNAGTAEGTARDLADIAMSKGFAPQVATLDSHAGNLPREGAVLIVTASYNGHPPDNAKQFVDWLDQASADEVKGVRYSVFGCGDKNWAATYQKVPAFIDETLAAKGAENIADRGEADASDDFEGTYEEWSDHMWSDVAAYFNLDIENSEDNKSTLSLQFVDSAADMPLAKMHGAFSTNVVASKELQQPGSARSTRHLEIELPKEASYQEGDHLGVIPRNYEGIVNRVTARFGLSASQQIRLEAEEEKLAHLPLAKTVSVEELLQYVELQDPVTRTQLRAMAAKTVCPPHKVELEALLEKQAYKEQVLAKRLTMLELLEKYPACEMKFSEFIALLPSIRPRYYSISSSPRVDEKQASITVSVVSGPAWSGYGEYKGIASNYLAELQEGDTITCFISTDQSEFTLPKDPETPLIMVGPGTGVAPFRGFVQARKQLKEQGQSLGEAHLYFGCRSPHEDYLYQEELENAQSEGIITLHTAFSRMPNQPKTYVQHVMEQDGKKLIELLDQGAHFYICGDGSQMAPAVEATLMKSYADVHQVSEADARLWLQQLEEKGRYAKDVWAG

SEQ ID NO: 267 - DNA, 3147 bp, synthetic construct
  misc_feature 1..3147: note = Variant of cytochrome P450
  source 1..3147: mol_type = other DNA
atgacaattaaggaaatgcctcagcctaagacgtttggagaacttaaaaatttaccgttattaaacacagataaaccggttcaagctttgatgcgtattgcggatgaattaggagaaatctttaaattcgaggcgcctggtagcgtaacgcgctttttatcaagtcagcgtctaattaaagaagcatgcgatgaatcacgctttgataaaaacttaagtcaaggccttaaatttgcacgtgatgcgctgggagacgccttaccgacaagctggacgcatgaaccgaattggaaaaaagcgcataatatcttaggcccaagctttagtcagcgtgcaatgaaacgttatcatgcgatgatggtcgatatcgccgtgcagcttgttcaaaagtgggagcgtctaaatgcagatgagcatattgaagtatcggaagacatgacacgtttaacgctggatacaattggtctttgcggcttcaactatcgctttaacagcttttaccgagatcagcctcatccatttattgtgagtgtcgtgcgtgcactggatgaagtaatgaacaagctgcagcgagcaaatccagacgacccagcttatgatgaaaacaagcgccagtgtcaagaaaacattaaggtggccaacgactatgtcgataaaattattgcagatcgcaaagcaaggggtgaacaaagccatgatttattaacgcagatgctaaacggaaaagatccagaaacgggtgagccgcttgatgacgggaacattcgttatcaaattattacattcttaattgcgggacacgaaacaacaagtggtcttttatcatttgcgctgtatttcttagtgaaaaatccacatgtattacaaaaagtagcagaagaagcagcacgagttctagtagatcctgttccaagctacaaacaagtcaaacagcttaaatatgtcggcatggtcttaaacgaagcgctgcgcttatggccaactgctcctgcgttttccctatatgcaaaagaagatacggtgcttggaggagaatatcctttaaccaaaggcgacgaagtaatggttctgattcctcagcttcaccgtgataaaacaatttggggagacgatgtggaggagttccgtccagagcgttttgaaaatccaagtgcgattccgcagcatgcgtttaaaccgtttggaaacggtcagcgtgcgtgtatcggtcagcagttcgctcttcatgaagcaacgctggtacttggtatgatgctaaaacactttgactttgaagatcatacaaactacgagctcgttattaaagaaaagttaacgttaaaacctgaaggctttgtggtaaaagcaaaatcgaaaggcattccgcttggcggtattccttcacctagcactgaacagtctgctaaaaaagtacgcaaaaaggcagaaaacgctcataatacgccgctgcttgtgctatacggttcaaatgcgggaacagctgaaggaacggcgcgtgatttagcagatattgcaatgagcaaaggatttgcaccgcaggtcgcaacgcttgattcacacgccggaaatcttccgcgcgaaggagctgtattaattgtaacggcgtcttataacggtcatccgcctgataacgcaaagcaatttgtcgactggttagaccaagcgtctgctgatgaagtaaaaggcgttcgctactccgtatttggatgcggcgataaaaactgggctgcgacgtatcaaaaagtgcctgcttttatcgatgaaacgcttgccgctaaaggggcagaaaacatcgctgaccgcggtgaagcagatgcaagcgacgactttgaaggcacatatgaagaatggagtgatcatatgtggagtgacgtagcagcctactttaacctcgacattgaaaacagtgaagataataaatctactctttcacttcaatttgtcgacagcgccgcggatatgccgcttgcgaaaatgcacggtgcgttttcaacgaacgtcgtagcaagcaaagaacttcaacagccaggcagtgcacgaagcacgcgacatcttgaaattgaacttccaaaagaagcttcttatcaagaaggagatcatttaggtgttattcctcgcaactatgaaggaatagtaaaccgtgtaacagcaaggttcggcctaagcgcatcacagcaaatccgtctggaagcagaagaagaaaaattagctcatttgccactcgctaaaacagtatccgtagaagagcttctgcaatacgtggagcttcaagatcctgttacgcgcacgcagcttcgcgcaatggctgctaaaacggtctgcccgccgcataaagtagagcttgaagccttgcttgaaaagcaagcctacaaagaacaagtgctggcaaaacgtttaacaatgcttgaactgcttgaaaaatacccggcgtgtgaaatgaaattcagcgaatttatcgcccttctgccaagcatacgcccgcgctattactcgatttcttcatcacctcgtgtcgatgaaaaacaagcaagcatcacggtcagcgttgtctcaggaccggcgtggagcggatatggagaatataaaggaattgcgtcgaactatcttgccgagctgcaagaaggagatacgattacgtgctttatttccacagatcagtcagaatttacgctgccaaaagaccctgaaacgccgcttatcatggtcggaccgggaacaggcgtcgcgccgtttagaggctttgtgcaggcgcgcaaacagctaaaagaacaaggacagtcacttggagaagcacatttatacttcggctgccgttcacctcatgaagactatctgtatcaagaagagcttgaaaacgcccaaagcgaaggcatcattacgcttcataccgctttttctcgcatgccaaatcagccgaaaacatacgttcagcacgtaatggaacaagacggcaagaaattgattgaacttcttgatcaaggagcgcacttctatatttgcggagacggaagccaaatggcacctgccgttgaagcaacgcttatgaaaagctatgctgacgttcaccaagtgagtgaagcagacgctcgcttatggctgcagcagctagaagaaaaaggccgatacgcaaaagacgtgtgggctggg

SEQ ID NO: 268 - protein, 1049 aa, synthetic construct
  REGION 1..1049: note = Variant of cytochrome P450
MTIKEMPQPKTFGELKNLPLLNTDKPVQALMRIADELGEIFKFEAPGSVTRFLSSQRLIKEACDESRFDKNLSQGLKFARDALGDALPTSWTHEPNWKKAHNILGPSFSQRAMKRYHAMMVDIAVQLVQKWERLNADEHIEVSEDMTRLTLDTIGLCGFNYRFNSFYRDQPHPFIVSVVRALDEVMNKLQRANPDDPAYDENKRQCQENIKVANDYVDKIIADRKARGEQSHDLLTQMLNGKDPETGEPLDDGNIRYQIITFLIAGHETTSGLLSFALYFLVKNPHVLQKVAEEAARVLVDPVPSYKQVKQLKYVGMVLNEALRLWPTAPAFSLYAKEDTVLGGEYPLTKGDEVMVLIPQLHRDKTIWGDDVEEFRPERFENPSAIPQHAFKPFGNGQRACIGQQFALHEATLVLGMMLKHFDFEDHTNYELVIKEKLTLKPEGFVVKAKSKGIPLGGIPSPSTEQSAKKVRKKAENAHNTPLLVLYGSNAGTAEGTARDLADIAMSKGFAPQVATLDSHAGNLPREGAVLIVTASYNGHPPDNAKQFVDWLDQASADEVKGVRYSVFGCGDKNWAATYQKVPAFIDETLAAKGAENIADRGEADASDDFEGTYEEWSDHMWSDVAAYFNLDIENSEDNKSTLSLQFVDSAADMPLAKMHGAFSTNVVASKELQQPGSARSTRHLEIELPKEASYQEGDHLGVIPRNYEGIVNRVTARFGLSASQQIRLEAEEEKLAHLPLAKTVSVEELLQYVELQDPVTRTQLRAMAAKTVCPPHKVELEALLEKQAYKEQVLAKRLTMLELLEKYPACEMKFSEFIALLPSIRPRYYSISSSPRVDEKQASITVSVVSGPAWSGYGEYKGIASNYLAELQEGDTITCFISTDQSEFTLPKDPETPLIMVGPGTGVAPFRGFVQARKQLKEQGQSLGEAHLYFGCRSPHEDYLYQEELENAQSEGIITLHTAFSRMPNQPKTYVQHVMEQDGKKLIELLDQGAHFYICGDGSQMAPAVEATLMKSYADVHQVSEADARLWLQQLEEKGRYAKDVWAG

SEQ ID NO: 269 - DNA, 3147 bp, synthetic construct
  misc_feature 1..3147: note = Variant of cytochrome P450
  source 1..3147: mol_type = other DNA
atgacaattaaggaaatgcctcagcctaagacgtttggagaacttaaaaatttaccgttattaaacacagataaaccggttcaagctttgatgcgtattgcggatgaattaggagagatctttaaattcgaggcgcctggtagcgtaacgcgctttttatcaagtcagcgtctaatcaaagaagcatgcgatgaatcacgctttgataaaaacttaagtcaaggccttaaatttgtgcgtgactttcttggagacgggttatttacaagctggacgcatgaaccgaattggaaaaaagcgcataatatcttaggcccaagctttagtcagcgtgcaatgaaacgttatcatgcgatgatggtcgatatcgccgtgcagcttgttcaaaagtgggagcgtctaaatgcagatgagcatattgaagtatcggaagacatgacacgtttaacgctggatacaattggtctttgcggcttcaactatcgctttaacagcttttaccgagatcagcctcatccatttattgtgagtgtggtgcgtgcactggatgaagttatgaacaagctgcagcgagcaaatccagacgacccagcttatgatgaaaacaagcgccagtgtcaagaagatatcaaggtgatgaacgactatgtcgataaaattattgcagatcgcaaagcaaggggtgaacaaagccatgatttattaacgcagatgctaaacggaaaagatccagaaacgggtgagccgcttgatgacgagaacattcgttatcaaattattacattcttaattgcgggacacgaaacaacaagtggtcttttatcatttgcgctgtatttcttagtgaaaaatccacatgtattacaaaaagtagcagaagaagcagcacgagttctagtagatcctgttccaagctacaaacaagtcaaacagcttaaatatgtcggcatggtcttaaacgaagcgctgcgcttatggccaactgctcctgcgttttccctatatgcaaaagaagatacggtgcttggaggagaatatcctttaaccaaaggcgacgaagtaatggttctgattcctcagcttcaccgtgataaaacaatttggggagacgatgtggaggagttccgtccagagcgttttgaaaatccaagtgcgattccgcagcatgcgtttaaaccgtttggaaacggtcagcgtgcgtgtatcggtcagcagttcgctcttcatgaagcaacgctggtacttggtatgatgctaaaacactttgactttgaagatcatacaaactacgagctcgttattaaagaaaagttaacgttaaaacctgaaggctttgtggtaaaagcaaaatcgaaaggcattccgcttggcggtattccttcacctagcactgaacagtctgctaaaaaagtacgcaaaaaggcagaaaacgctcataatacgccgctgcttgtgctatacggttcaaatgcgggaacagctgaaggaacggcgcgtgatttagcagatattgcaatgagcaaaggatttgcaccgcaggtcgcaacgcttgattcacacgccggaaatcttccgcgcgaaggagctgtattaattgtaacggcgtcttataacggtcatccgcctgataacgcaaagcaatttgtcgactggttagaccaagcgtctgctgatgaagtaaaaggcgttcgctactccgtatttggatgcggcgataaaaactgggctgcgacgtatcaaaaagtgcctgcttttatcgatgaaacgcttgccgctaaaggggcagaaaacatcgctgaccgcggtgaagcagatgcaagcgacgactttgaaggcacatatgaagaatggagtgatcatatgtggagtgacgtagcagcctactttaacctcgacattgaaaacagtgaagataataaatctactctttcacttcaatttgtcgacagcgccgcggatatgccgcttgcgaaaatgcacggtgcgttttcaacgaacgtcgtagcaagcaaagaacttcaacagccaggcagtgcacgaagcacgcgacatcttgaaattgaacttccaaaagaagcttcttatcaagaaggagatcatttaggtgttattcctcgcaactatgaaggaatagtaaaccgtgtaacagcaaggttcggcctaagcgcatcacagcaaatccgtctggaagcagaagaagaaaaattagctcatttgccactcgctaaaacagtatccgtagaagagcttctgcaatacgtggagcttcaagatcctgttacgcgcacgcagcttcgcgcaatggctgctaaaacggtctgcccgccgcataaagtagagcttgaagccttgcttgaaaagcaagcctacaaagaacaagtgctggcaaaacgtttaacaatgcttgaactgcttgaaaaatacccggcgtgtgaaatgaaattcagcgaatttatcgcccttctgccaagcatacgcccgcgctattactcgatttcttcatcacctcgtgtcgatgaaaaacaagcaagcatcacggtcagcgttgtctcaggaccggcgtggagcggatatggagaatataaaggaattgcgtcgaactatcttgccgagctgcaagaaggagatacgattacgtgctttatttccacagatcagtcagaatttacgctgccaaaagaccctgaaacgccgcttatcatggtcggaccgggaacaggcgtcgcgccgtttagaggctttgtgcaggcgcgcaaacagctaaaagaacaaggacagtcacttggagaagcacatttatacttcggctgccgttcacctcatgaagactatctgtatcaagaagagcttgaaaacgcccaaagcgaaggcatcattacgcttcataccgctttttctcgcatgccaaatcagccgaaaacatacgttcagcacgtaatggaacaagacggcaagaaattgattgaacttcttgatcaaggagcgcacttctatatttgcggagacggaagccaaatggcacctgccgttgaagcaacgcttatgaaaagctatgctgacgttcaccaagtgagtgaagcagacgctcgcttatggctgcagcagctagaagaaaaaggccgatacgcaaaagacgtgtgggctggg

SEQ ID NO: 270 - protein, 1049 aa, synthetic construct
  REGION 1..1049: note = Variant of cytochrome P450
MTIKEMPQPKTFGELKNLPLLNTDKPVQALMRIADELGEIFKFEAPGSVTRFLSSQRLIKEACDESRFDKNLSQGLKFVRDFLGDGLFTSWTHEPNWKKAHNILGPSFSQRAMKRYHAMMVDIAVQLVQKWERLNADEHIEVSEDMTRLTLDTIGLCGFNYRFNSFYRDQPHPFIVSVVRALDEVMNKLQRANPDDPAYDENKRQCQEDIKVMNDYVDKIIADRKARGEQSHDLLTQMLNGKDPETGEPLDDENIRYQIITFLIAGHETTSGLLSFALYFLVKNPHVLQKVAEEAARVLVDPVPSYKQVKQLKYVGMVLNEALRLWPTAPAFSLYAKEDTVLGGEYPLTKGDEVMVLIPQLHRDKTIWGDDVEEFRPERFENPSAIPQHAFKPFGNGQRACIGQQFALHEATLVLGMMLKHFDFEDHTNYELVIKEKLTLKPEGFVVKAKSKGIPLGGIPSPSTEQSAKKVRKKAENAHNTPLLVLYGSNAGTAEGTARDLADIAMSKGFAPQVATLDSHAGNLPREGAVLIVTASYNGHPPDNAKQFVDWLDQASADEVKGVRYSVFGCGDKNWAATYQKVPAFIDETLAAKGAENIADRGEADASDDFEGTYEEWSDHMWSDVAAYFNLDIENSEDNKSTLSLQFVDSAADMPLAKMHGAFSTNVVASKELQQPGSARSTRHLEIELPKEASYQEGDHLGVIPRNYEGIVNRVTARFGLSASQQIRLEAEEEKLAHLPLAKTVSVEELLQYVELQDPVTRTQLRAMAAKTVCPPHKVELEALLEKQAYKEQVLAKRLTMLELLEKYPACEMKFSEFIALLPSIRPRYYSISSSPRVDEKQASITVSVVSGPAWSGYGEYKGIASNYLAELQEGDTITCFISTDQSEFTLPKDPETPLIMVGPGTGVAPFRGFVQARKQLKEQGQSLGEAHLYFGCRSPHEDYLYQEELENAQSEGIITLHTAFSRMPNQPKTYVQHVMEQDGKKLIELLDQGAHFYICGDGSQMAPAVEATLMKSYADVHQVSEADARLWLQQLEEKGRYAKDVWAG

SEQ ID NO: 271 - DNA, 3147 bp, synthetic construct
  misc_feature 1..3147: note = Variant of cytochrome P450
  source 1..3147: mol_type = other DNA
atgacaattaaggaaatgcctcagcctaagacgtttggagaacttaaaaatttaccgttattaaacacagataaaccggttcaagctttgatgcgtattgcggatgaattaggagagatctttaaattcgaggcgcctggtagcgtaacgcgctttgtgtcaagtcagcgtctagtcaaagaagcatgcgatgaatcacgctttgataaaaacttaagtcaaggccttaaatttgcgcgtgactttcttggagacgggttatttacaagctggacgcatgaaccgaattggaaaaaagcgcataatatcttaggcccaagctttagtcagcgtgcaatgaaacgttatcatgcgatgatggtcgatatcgccgtgcagcttgttcaaaagtgggagcgtctaaatgcagatgagcatattgaagtatcggaagacatgacacgtttaacgctggatacaattggtctttgcggcttcaactatcgctttaacagcttttaccgagatcagcctcatccatttattgtgagtgttgtgcgtgcactggatgaagttatgaacaagctgcagcgagcaaatccagacgacccagcttatgatgaaaacaagcgccagtgtcaagaagatatcaaggtgatgaacgactatgtcgataaaattattgcagatcgcaaagcaaggggtgaacaaagccatgatttattaacgcagatgctaaacggaaaagatccagaaacgggtgagccgcttgatgacgggaacattcgttatcaaattattacattcttaattgcgggacacgaaacaacaagtggtcttttatcatttgcgctgtatttcttagtgaaaaatccacatgtattacaaaaagtagcagaagaagcagcacgagttctagtagatcctgttccaagctacaaacaagtcaaacagcttaaatatgtcggcatggtcttaaacgaagcgctgcgcttatggccaactgctcctgcgttttccctatatgcaaaagaagatacggtgcttggaggagaatatcctttaaccaaaggcgacgaagtaatggttctgattcctcagcttcaccgtgataaaacaatttggggagacgatgtggaggagttccgtccagagcgttttgaaaatccaagtgcgattccgcagcatgcgtttaaaccgtttggaaacggtcagcgtgcgtgtatcggtcagcagttcgctcttcatgaagcaacgctggtacttggtatgatgctaaaacactttgactttgaagatcatacaaactacgagctcgttattaaagaaaagttaacgttaaaacctgaaggctttgtggtaaaagcaaaatcgaaaggcattccgcttggcggtattccttcacctagcactgaacagtctgctaaaaaagtacgcaaaaaggcagaaaacgctcataatacgccgctgcttgtgctatacggttcaaatgcgggaacagctgaaggaacggcgcgtgatttagcagatattgcaatgagcaaaggatttgcaccgcaggtcgcaacgcttgattcacacgccggaaatcttccgcgcgaaggagctgtattaattgtaacggcgtcttataacggtcatccgcctgataacgcaaagcaatttgtcgactggttagaccaagcgtctgctgatgaagtaaaaggcgttcgctactccgtatttggatgcggcgataaaaactgggctgcgacgtatcaaaaagtgcctgcttttatcgatgaaacgcttgccgctaaaggggcagaaaacatcgctgaccgcggtgaagcagatgcaagcgacgactttgaaggcacatatgaagaatggagtgatcatatgtggagtgacgtagcagcctactttaacctcgacattgaaaacagtgaagataataaatctactctttcacttcaatttgtcgacagcgccgcggatatgccgcttgcgaaaatgcacggtgcgttttcaacgaacgtcgtagcaagcaaagaacttcaacagccaggcagtgcacgaagcacgcgacatcttgaaattgaacttccaaaagaagcttcttatcaagaaggagatcatttaggtgttattcctcgcaactatgaaggaatagtaaaccgtgtaacagcaaggttcggcctaagcgcatcacagcaaatccgtctggaagcagaagaagaaaaattagctcatttgccactcgctaaaacagtatccgtagaagagcttctgcaatacgtggagcttcaagatcctgttacgcgcacgcagcttcgcgcaatggctgctaaaacggtctgcccgccgcataaagtagagcttgaagccttgcttgaaaagcaagcctacaaagaacaagtgctggcaaaacgtttaacaatgcttgaactgcttgaaaaatacccggcgtgtgaaatgaaattcagcgaatttatcgcccttctgccaagcatacgcccgcgctattactcgatttcttcatcacctcgtgtcgatgaaaaacaagcaagcatcacggtcagcgttgtctcaggaccggcgtggagcggatatggagaatataaaggaattgcgtcgaactatcttgccgagctgcaagaaggagatacgattacgtgctttatttccacagatcagtcagaatttacgctgccaaaagaccctgaaacgccgcttatcatggtcggaccgggaacaggcgtcgcgccgtttagaggctttgtgcaggcgcgcaaacagctaaaagaacaaggacagtcacttggagaagcacatttatacttcggctgccgttcacctcatgaagactatctgtatcaagaagagcttgaaaacgcccaaagcgaaggcatcattacgcttcataccgctttttctcgcatgccaaatcagccgaaaacatacgttcagcacgtaatggaacaagacggcaagaaattgattgaacttcttgatcaaggagcgcacttctatatttgcggagacggaagccaaatggcacctgccgttgaagcaacgcttatgaaaagctatgctgacgttcaccaagtgagtgaagcagacgctcgcttatggctgcagcagctagaagaaaaaggccgatacgcaaaagacgtgtgggctggg

SEQ ID NO: 272 - protein, 1049 aa, synthetic construct
  REGION 1..1049: note = Variant of cytochrome P450
MTIKEMPQPKTFGELKNLPLLNTDKPVQALMRIADELGEIFKFEAPGSVTRFVSSQRLVKEACDESRFDKNLSQGLKFARDFLGDGLFTSWTHEPNWKKAHNILGPSFSQRAMKRYHAMMVDIAVQLVQKWERLNADEHIEVSEDMTRLTLDTIGLCGFNYRFNSFYRDQPHPFIVSVVRALDEVMNKLQRANPDDPAYDENKRQCQEDIKVMNDYVDKIIADRKARGEQSHDLLTQMLNGKDPETGEPLDDGNIRYQIITFLIAGHETTSGLLSFALYFLVKNPHVLQKVAEEAARVLVDPVPSYKQVKQLKYVGMVLNEALRLWPTAPAFSLYAKEDTVLGGEYPLTKGDEVMVLIPQLHRDKTIWGDDVEEFRPERFENPSAIPQHAFKPFGNGQRACIGQQFALHEATLVLGMMLKHFDFEDHTNYELVIKEKLTLKPEGFVVKAKSKGIPLGGIPSPSTEQSAKKVRKKAENAHNTPLLVLYGSNAGTAEGTARDLADIAMSKGFAPQVATLDSHAGNLPREGAVLIVTASYNGHPPDNAKQFVDWLDQASADEVKGVRYSVFGCGDKNWAATYQKVPAFIDETLAAKGAENIADRGEADASDDFEGTYEEWSDHMWSDVAAYFNLDIENSEDNKSTLSLQFVDSAADMPLAKMHGAFSTNVVASKELQQPGSARSTRHLEIELPKEASYQEGDHLGVIPRNYEGIVNRVTARFGLSASQQIRLEAEEEKLAHLPLAKTVSVEELLQYVELQDPVTRTQLRAMAAKTVCPPHKVELEALLEKQAYKEQVLAKRLTMLELLEKYPACEMKFSEFIALLPSIRPRYYSISSSPRVDEKQASITVSVVSGPAWSGYGEYKGIASNYLAELQEGDTITCFISTDQSEFTLPKDPETPLIMVGPGTGVAPFRGFVQARKQLKEQGQSLGEAHLYFGCRSPHEDYLYQEELENAQSEGIITLHTAFSRMPNQPKTYVQHVMEQDGKKLIELLDQGAHFYICGDGSQMAPAVEATLMKSYADVHQVSEADARLWLQQLEEKGRYAKDVWAG

SEQ ID NO: 273 - DNA, 3147 bp, synthetic construct
  misc_feature 1..3147: note = Variant of cytochrome P450
  source 1..3147: mol_type = other DNA
atgacaattaaggaaatgcctcagcctaagacgtttggagaacttaaaaatttaccgttattaaacacagataaaccggttcaagctttgatgcgtattgcggatgaattaggagagatctttaaattcgaggcgcctggtagcgtaacgcgctttctgtcaggtcagcgtctagtcaaagaagcatgcgatgaatcacgctttgataaaaacttaagtcaaggccttaaatttgcgcgtgactttcttggagacgggttatttacaagctggacgcatgaaccgaattggaaaaaagcgcataatatcttaggcccaagctttagtcagcgtgcaatgaaacgttatcatgcgatgatggtcgatatcgccgcgcagcttgttcaaaagtgggagcgtctaaatgcagatgagcatattgaagtatcggaagacatgacacgtttaacgctggatacaattggtctttgcggcttcaactatcgctttaacagcttttaccgagatcagcctcatccatttattgtgagtgtggtgcgtgcactggatgaagtaatgaacaagctgcagcgagcaaatccagacgacccagcttatgatgaaaacaagcgccagtttcaagaagatatcaaggtgatgaacgactatgtcgataaaattattgcagatcgcaaagcaaggggtgaacaaagccatgatttattaacgcagatgctaaacggaaaagatccagaaacgggtgagccgcttgatgacgggaacattcgttatcaaattattacattcttaattgcgggacacgaaacaacaagtggtcttttatcatttgcgctgtatttcttagtgaaaaatccacatgtattacaaaaagtagcagaagaagcagcacgagttctagtagatcctgttccaagctacaaacaagtcaaacagcttaaatatgtcggcatggtcttaaacgaagcgctgcgcttatggccaactgctcctgcgttttccctatatgcaaaagaagatacggtgcttggaggagaatatcctttaaccaaaggcgacgaagtaatggttctgattcctcagcttcaccgtgataaaacaatttggggagacgatgtggaggagttccgtccagagcgttttgaaaatccaagtgcgattccgcagcatgcgtttaaaccgtttggaaacggtcagcgtgcgtgtatcggtcagcagttcgctcttcatgaagcaacgctggtacttggtatgatgctaaaacactttgactttgaagatcatacaaactacgagctcgttattaaagaaaagttaacgttaaaacctgaaggctttgtggtaaaagcaaaatcgaaaggcattccgcttggcggtattccttcacctagcactgaacagtctgctaaaaaagtacgcaaaaaggcagaaaacgctcataatacgccgctgcttgtgctatacggttcaaatgcgggaacagctgaaggaacggcgcgtgatttagcagatattgcaatgagcaaaggatttgcaccgcaggtcgcaacgcttgattcacacgccggaaatcttccgcgcgaaggagctgtattaattgtaacggcgtcttataacggtcatccgcctgataacgcaaagcaatttgtcgactggttagaccaagcgtctgctgatgaagtaaaaggcgttcgctactccgtatttggatgcggcgataaaaactgggctgcgacgtatcaaaaagtgcctgcttttatcgatgaaacgcttgccgctaaaggggcagaaaacatcgctgaccgcggtgaagcagatgcaagcgacgactttgaaggcacatatgaagaatggagtgatcatatgtggagtgacgtagcagcctactttaacctcgacattgaaaacagtgaagataataaatctactctttcacttcaatttgtcgacagcgccgcggatatgccgcttgcgaaaatgcacggtgcgttttcaacgaacgtcgtagcaagcaaagaacttcaacagccaggcagtgcacgaagcacgcgacatcttgaaattgaacttccaaaagaagcttcttatcaagaaggagatcatttaggtgttattcctcgcaactatgaaggaatagtaaaccgtgtaacagcaaggttcggcctaagcgcatcacagcaaatccgtctggaagcagaagaagaaaaattagctcatttgccactcgctaaaacagtatccgtagaagagcttctgcaatacgtggagcttcaagatcctgttacgcgcacgcagcttcgcgcaatggctgctaaaacggtctgcccgccgcataaagtagagcttgaagccttgcttgaaaagcaagcctacaaagaacaagtgctggcaaaacgtttaacaatgcttgaactgcttgaaaaatacccggcgtgtgaaatgaaattcagcgaatttatcgcccttctgccaagcatacgcccgcgctattactcgatttcttcatcacctcgtgtcgatgaaaaacaagcaagcatcacggtcagcgttgtctcaggaccggcgtggagcggatatggagaatataaaggaattgcgtcgaactatcttgccgagctgcaagaaggagatacgattacgtgctttatttccacagatcagtcagaatttacgctgccaaaagaccctgaaacgccgcttatcatggtcggaccgggaacaggcgtcgcgccgtttagaggctttgtgcaggcgcgcaaacagctaaaagaacaaggacagtcacttggagaagcacatttatacttcggctgccgttcacctcatgaagactatctgtatcaagaagagcttgaaaacgcccaaagcgaaggcatcattacgcttcataccgctttttctcgcatgccaaatcagccgaaaacatacgttcagcacgtaatggaacaagacggcaagaaattgattgaacttcttgatcaaggagcgcacttctatatttgcggagacggaagccaaatggcacctgccgttgaagcaacgcttatgaaaagctatgctgacgttcaccaagtgagtgaagcagacgctcgcttatggctgcagcagctagaagaaaaaggccgatacgcaaaagacgtgtgggctggg

SEQ ID NO: 274 - protein, 1049 aa, synthetic construct
  REGION 1..1049: note = Variant of cytochrome P450
MTIKEMPQPKTFGELKNLPLLNTDKPVQALMRIADELGEIFKFEAPGSVTRFLSGQRLVKEACDESRFDKNLSQGLKFARDFLGDGLFTSWTHEPNWKKAHNILGPSFSQRAMKRYHAMMVDIAAQLVQKWERLNADEHIEVSEDMTRLTLDTIGLCGFNYRFNSFYRDQPHPFIVSVVRALDEVMNKLQRANPDDPAYDENKRQFQEDIKVMNDYVDKIIADRKARGEQSHDLLTQMLNGKDPETGEPLDDGNIRYQIITFLIAGHETTSGLLSFALYFLVKNPHVLQKVAEEAARVLVDPVPSYKQVKQLKYVGMVLNEALRLWPTAPAFSLYAKEDTVLGGEYPLTKGDEVMVLIPQLHRDKTIWGDDVEEFRPERFENPSAIPQHAFKPFGNGQRACIGQQFALHEATLVLGMMLKHFDFEDHTNYELVIKEKLTLKPEGFVVKAKSKGIPLGGIPSPSTEQSAKKVRKKAENAHNTPLLVLYGSNAGTAEGTARDLADIAMSKGFAPQVATLDSHAGNLPREGAVLIVTASYNGHPPDNAKQFVDWLDQASADEVKGVRYSVFGCGDKNWAATYQKVPAFIDETLAAKGAENIADRGEADASDDFEGTYEEWSDHMWSDVAAYFNLDIENSEDNKSTLSLQFVDSAADMPLAKMHGAFSTNVVASKELQQPGSARSTRHLEIELPKEASYQEGDHLGVIPRNYEGIVNRVTARFGLSASQQIRLEAEEEKLAHLPLAKTVSVEELLQYVELQDPVTRTQLRAMAAKTVCPPHKVELEALLEKQAYKEQVLAKRLTMLELLEKYPACEMKFSEFIALLPSIRPRYYSISSSPRVDEKQASITVSVVSGPAWSGYGEYKGIASNYLAELQEGDTITCFISTDQSEFTLPKDPETPLIMVGPGTGVAPFRGFVQARKQLKEQGQSLGEAHLYFGCRSPHEDYLYQEELENAQSEGIITLHTAFSRMPNQPKTYVQHVMEQDGKKLIELLDQGAHFYICGDGSQMAPAVEATLMKSYADVHQVSEADARLWLQQLEEKGRYAKDVWAG

SEQ ID NO: 275 - DNA, 3147 bp, synthetic construct
  misc_feature 1..3147: note = Variant of cytochrome P450
  source 1..3147: mol_type = other DNA
atgacaattaaggaaatgcctcagcctaagacgtttggagaacttaaaaatttaccgttattaaacacagataaaccggttcaagctttgatgcgtattgcggatgaattaggagaaatctttaaattcgaggcgcctggtagcgtaacgcgctttttatcaagtcagcgtctaattaaagaagcatgcgatgaatcacgctttgataaaaacttaagtcaaggccttaaatttgcacgtgatttcctgggagacgccttatttacaagctggacgcatgaaccgaattggaaaaaagcgcataatatcttaggcccaagctttagtcagcgtgcaatgaaacgttatcatgcgatgatggtcgatatcgccgtgcagcttgttcaaaagtgggagcgtctaaatgcagatgagcatattgaagtatcggaagacatgacacgtttaacgctggatacaattggtctttgcggcttcaactatcgctttaacagcttttaccgagatcagcctcatccatttattgtgagtggcgtgcgtgcactggatgaagtaatgaacaagctgcagcgagcaaatccagacgacccagcttatgatgaaaacaagcgccagtgtcaagaaaacgttaaggtgatgaacgactatgtcgataaaattattgcagatcgcaaagcaaggggtgaacaaagccatgatttattaacgcagatgctaaacggaaaagatccagaaacgggtgagccgcttgatgacgggaacattcgttatcaaattattacattcttaattgcgggacacgaaacaacaagtggtcttttatcatttgcgctgtatttcttagtgaaaaatccacatgtattacaaaaagtagcagaagaagcagcacgagttctagtagatcctgttccaagctacaaacaagtcaaacagcttaaatatgtcggcatggtcttaaacgaagcgctgcgcttatggccaactgctcctgcgttttccctatatgcaaaagaagatacggtgcttggaggagaatatcctttaaccaaaggcgacgaagtaatggttctgattcctcagcttcaccgtgataaaacaatttggggagacgatgtggaggagttccgtccagagcgttttgaaaatccaagtgcgattccgcagcatgcgtttaaaccgtttggaaacggtcagcgtgcgtgtatcggtcagcagttcgctcttcatgaagcaacgctggtacttggtatgatgctaaaacactttgactttgaagatcatacaaactacgagctcgttattaaagaaaagttaacgttaaaacctgaaggctttgtggtaaaagcaaaatcgaaaggcattccgcttggcggtattccttcacctagcactgaacagtctgctaaaaaagtacgcaaaaaggcagaaaacgctcataatacgccgctgcttgtgctatacggttcaaatgcgggaacagctgaaggaacggcgcgtgatttagcagatattgcaatgagcaaaggatttgcaccgcaggtcgcaacgcttgattcacacgccggaaatcttccgcgcgaaggagctgtattaattgtaacggcgtcttataacggtcatccgcctgataacgcaaagcaatttgtcgactggttagaccaagcgtctgctgatgaagtaaaaggcgttcgctactccgtatttggatgcggcgataaaaactgggctgcgacgtatcaaaaagtgcctgcttttatcgatgaaacgcttgccgctaaaggggcagaaaacatcgctgaccgcggtgaagcagatgcaagcgacgactttgaaggcacatatgaagaatggagtgatcatatgtggagtgacgtagcagcctactttaacctcgacattgaaaacagtgaagataataaatctactctttcacttcaatttgtcgacagcgccgcggatatgccgcttgcgaaaatgcacggtgcgttttcaacgaacgtcgtagcaagcaaagaacttcaacagccaggcagtgcacgaagcacgcgacatcttgaaattgaacttccaaaagaagcttcttatcaagaaggagatcatttaggtgttattcctcgcaactatgaaggaatagtaaaccgtgtaacagcaaggttcggcctaagcgcatcacagcaaatccgtctggaagcagaagaagaaaaattagctcatttgccactcgctaaaacagtatccgtagaagagcttctgcaatacgtggagcttcaagatcctgttacgcgcacgcagcttcgcgcaatggctgctaaaacggtctgcccgccgcataaagtagagcttgaagccttgcttgaaaagcaagcctacaaagaacaagtgctggcaaaacgtttaacaatgcttgaactgcttgaaaaatacccggcgtgtgaaatgaaattcagcgaatttatcgcccttctgccaagcatacgcccgcgctattactcgatttcttcatcacctcgtgtcgatgaaaaacaagcaagcatcacggtcagcgttgtctcaggaccggcgtggagcggatatggagaatataaaggaattgcgtcgaactatcttgccgagctgcaagaaggagatacgattacgtgctttatttccacagatcagtcagaatttacgctgccaaaagaccctgaaacgccgcttatcatggtcggaccgggaacaggcgtcgcgccgtttagaggctttgtgcaggcgcgcaaacagctaaaagaacaaggacagtcacttggagaagcacatttatacttcggctgccgttcacctcatgaagactatctgtatcaagaagagcttgaaaacgcccaaagcgaaggcatcattacgcttcataccgctttttctcgcatgccaaatcagccgaaaacatacgttcagcacgtaatggaacaagacggcaagaaattgattgaacttcttgatcaaggagcgcacttctatatttgcggagacggaagccaaatggcacctgccgttgaagcaacgcttatgaaaagctatgctgacgttcaccaagtgagtgaagcagacgctcgcttatggctgcagcagctagaagaaaaaggccgatacgcaaaagacgtgtgggctggg

SEQ ID NO: 276 - protein, 1049 aa, synthetic construct
  REGION 1..1049: note = Variant of cytochrome P450
MTIKEMPQPKTFGELKNLPLLNTDKPVQALMRIADELGEIFKFEAPGSVTRFLSSQRLIKEACDESRFDKNLSQGLKFARDFLGDALFTSWTHEPNWKKAHNILGPSFSQRAMKRYHAMMVDIAVQLVQKWERLNADEHIEVSEDMTRLTLDTIGLCGFNYRFNSFYRDQPHPFIVSGVRALDEVMNKLQRANPDDPAYDENKRQCQENVKVMNDYVDKIIADRKARGEQSHDLLTQMLNGKDPETGEPLDDGNIRYQIITFLIAGHETTSGLLSFALYFLVKNPHVLQKVAEEAARVLVDPVPSYKQVKQLKYVGMVLNEALRLWPTAPAFSLYAKEDTVLGGEYPLTKGDEVMVLIPQLHRDKTIWGDDVEEFRPERFENPSAIPQHAFKPFGNGQRACIGQQFALHEATLVLGMMLKHFDFEDHTNYELVIKEKLTLKPEGFVVKAKSKGIPLGGIPSPSTEQSAKKVRKKAENAHNTPLLVLYGSNAGTAEGTARDLADIAMSKGFAPQVATLDSHAGNLPREGAVLIVTASYNGHPPDNAKQFVDWLDQASADEVKGVRYSVFGCGDKNWAATYQKVPAFIDETLAAKGAENIADRGEADASDDFEGTYEEWSDHMWSDVAAYFNLDIENSEDNKSTLSLQFVDSAADMPLAKMHGAFSTNVVASKELQQPGSARSTRHLEIELPKEASYQEGDHLGVIPRNYEGIVNRVTARFGLSASQQIRLEAEEEKLAHLPLAKTVSVEELLQYVELQDPVTRTQLRAMAAKTVCPPHKVELEALLEKQAYKEQVLAKRLTMLELLEKYPACEMKFSEFIALLPSIRPRYYSISSSPRVDEKQASITVSVVSGPAWSGYGEYKGIASNYLAELQEGDTITCFISTDQSEFTLPKDPETPLIMVGPGTGVAPFRGFVQARKQLKEQGQSLGEAHLYFGCRSPHEDYLYQEELENAQSEGIITLHTAFSRMPNQPKTYVQHVMEQDGKKLIELLDQGAHFYICGDGSQMAPAVEATLMKSYADVHQVSEADARLWLQQLEEKGRYAKDVWAG

SEQ ID NO: 277 - DNA, 3147 bp, synthetic construct
  misc_feature 1..3147: note = Variant of cytochrome P450
  source 1..3147: mol_type = other DNA
atgacaattaaggaaatgcctcagcctaagacgtttggagaacttaaaaatttaccgttattaaacacagataaaccggttcaagctttgatgcgtattgcggatgaattaggagaaatctttaaattcgaggcgcctggtagcgtaacgcgctttttatcaagtcagcgtctaattaaagaagcatgcgatgaatcacgctttgataaaaacttaagtcaaggcgctaaatttgggcgtgattttagtggagacgggttatttacaagctggacgcatgaaccgaattggaaaaaagcgcataatatcttaggcccaagctttagtcagcgtgcaatgaaacgttatcatgcgatgatggtcgatatcgccgtgcagcttgttcaaaagtgggagcgtctaaatgcagatgagcatattgaagtatcggaagacatgacacgtttaacgctggatacaattggtctttgcggcttcaactatcgctttaacagcttttaccgagatcagcctcatccatttattgtgagtgttgtgcgtgcaggggatgaagtaatgaacaagctgcagcgagcaaatccagacgacccagcttatgatgaaaacaagcgccagtgtcaagaagatatcaaggtgatgaacgactatgtcgataaaattattgcagatcgcaaagcaaggggtgaacaaagccatgatttattaacgcagatgctaaacggaaaagatccagaaacgggtgagccgcttgatgacgggaacattcgttatcaaattattacattcttaatcgcgggacacaatacaacaagtggtcttttatcatttgcgctgtatttcttagtgaaaaatccacatgtattacaaaaagtagcagaagaagcagcacgagttctagtagatcctgttccaagctacaaacaagtcaaacagcttaaatatgtcggcatggtcttaaacgaagcgctgcgcttatggccaactgttcctgcgttttccctatatgcaaaagaagatacggtgcttggaggagaatatcctttaaccaaaggcgacgaagtaatggttctgattcctcagcttcaccgtgataaaacaatttggggagacgatgtggaggagttccgtccagagcgttttgaaaatccaagtgcgattccgcagcatgcgtttaaaccgtttggaaacggtcagcgtgcgtgtatcggtcagcagttcgctcttcatgaagcaacgctggtacttggtatgatgctaaaacactttgactttgaagatcatacaaactacgagctcgttattaaagaaaagttaacgttaaaacctgaaggctttgtggtaaaagcaaaatcgaaaggcattccgcttggcggtattccttcacctagcactgaacagtctgctaaaaaagtacgcaaaaaggcagaaaacgctcataatacgccgctgcttgtgctatacggttcaaatgcgggaacagctgaaggaacggcgcgtgatttagcagatattgcaatgagcaaaggatttgcaccgcaggtcgcaacgcttgattcacacgccggaaatcttccgcgcgaaggagctgtattaattgtaacggcgtcttataacggtcatccgcctgataacgcaaagcaatttgtcgactggttagaccaagcgtctgctgatgaagtaaaaggcgttcgctactccgtatttggatgcggcgataaaaactgggctgcgacgtatcaaaaagtgcctgcttttatcgatgaaacgcttgccgctaaaggggcagaaaacatcgctgaccgcggtgaagcagatgcaagcgacgactttgaaggcacatatgaagaatggagtgatcatatgtggagtgacgtagcagcctactttaacctcgacattgaaaacagtgaagataataaatctactctttcacttcaatttgtcgacagcgccgcggatatgccgcttgcgaaaatgcacggtgcgttttcaacgaacgtcgtagcaagcaaagaacttcaacagccaggcagtgcacgaagcacgcgacatcttgaaattgaacttccaaaagaagcttcttatcaagaaggagatcatttaggtgttattcctcgcaactatgaaggaatagtaaaccgtgtaacagcaaggttcggcctaagcgcatcacagcaaatccgtctggaagcagaagaagaaaaattagctcatttgccactcgctaaaacagtatccgtagaagagcttctgcaatacgtggagcttcaagatcctgttacgcgcacgcagcttcgcgcaatggctgctaaaacggtctgcccgccgcataaagtagagcttgaagccttgcttgaaaagcaagcctacaaagaacaagtgctggcaaaacgtttaacaatgcttgaactgcttgaaaaatacccggcgtgtgaaatgaaattcagcgaatttatcgcccttctgccaagcatacgcccgcgctattactcgatttcttcatcacctcgtgtcgatgaaaaacaagcaagcatcacggtcagcgttgtctcaggaccggcgtggagcggatatggagaatataaaggaattgcgtcgaactatcttgccgagctgcaagaaggagatacgattacgtgctttatttccacagatcagtcagaatttacgctgccaaaagaccctgaaacgccgcttatcatggtcggaccgggaacaggcgtcgcgccgtttagaggctttgtgcaggcgcgcaaacagctaaaagaacaaggacagtcacttggagaagcacatttatacttcggctgccgttcacctcatgaagactatctgtatcaagaagagcttgaaaacgcccaaagcgaaggcatcattacgcttcataccgctttttctcgcatgccaaatcagccgaaaacatacgttcagcacgtaatggaacaagacggcaagaaattgattgaacttcttgatcaaggagcgcacttctatatttgcggagacggaagccaaatggcacctgccgttgaagcaacgcttatgaaaagctatgctgacgttcaccaagtgagtgaagcagacgctcgcttatggctgcagcagctagaagaaaaaggccgatacgcaaaagacgtgtgggctggg

SEQ ID NO: 278 - protein, 1049 aa, synthetic construct
  REGION 1..1049: note = Variant of cytochrome P450
MTIKEMPQPKTFGELKNLPLLNTDKPVQALMRIADELGEIFKFEAPGSVTRFLSSQRLIKEACDESRFDKNLSQGAKFGRDFSGDGLFTSWTHEPNWKKAHNILGPSFSQRAMKRYHAMMVDIAVQLVQKWERLNADEHIEVSEDMTRLTLDTIGLCGFNYRFNSFYRDQPHPFIVSVVRAGDEVMNKLQRANPDDPAYDENKRQCQEDIKVMNDYVDKIIADRKARGEQSHDLLTQMLNGKDPETGEPLDDGNIRYQIITFLIAGHNTTSGLLSFALYFLVKNPHVLQKVAEEAARVLVDPVPSYKQVKQLKYVGMVLNEALRLWPTVPAFSLYAKEDTVLGGEYPLTKGDEVMVLIPQLHRDKTIWGDDVEEFRPERFENPSAIPQHAFKPFGNGQRACIGQQFALHEATLVLGMMLKHFDFEDHTNYELVIKEKLTLKPEGFVVKAKSKGIPLGGIPSPSTEQSAKKVRKKAENAHNTPLLVLYGSNAGTAEGTARDLADIAMSKGFAPQVATLDSHAGNLPREGAVLIVTASYNGHPPDNAKQFVDWLDQASADEVKGVRYSVFGCGDKNWAATYQKVPAFIDETLAAKGAENIADRGEADASDDFEGTYEEWSDHMWSDVAAYFNLDIENSEDNKSTLSLQFVDSAADMPLAKMHGAFSTNVVASKELQQPGSARSTRHLEIELPKEASYQEGDHLGVIPRNYEGIVNRVTARFGLSASQQIRLEAEEEKLAHLPLAKTVSVEELLQYVELQDPVTRTQLRAMAAKTVCPPHKVELEALLEKQAYKEQVLAKRLTMLELLEKYPACEMKFSEFIALLPSIRPRYYSISSSPRVDEKQASITVSVVSGPAWSGYGEYKGIASNYLAELQEGDTITCFISTDQSEFTLPKDPETPLIMVGPGTGVAPFRGFVQARKQLKEQGQSLGEAHLYFGCRSPHEDYLYQEELENAQSEGIITLHTAFSRMPNQPKTYVQHVMEQDGKKLIELLDQGAHFYICGDGSQMAPAVEATLMKSYADVHQVSEADARLWLQQLEEKGRYAKDVWAG

SEQ ID NO: 279 - DNA, 3147 bp, synthetic construct
  misc_feature 1..3147: note = Variant of cytochrome P450
  source 1..3147: mol_type = other DNA
atgacaattaaggaaatgcctcagcctaagacgtttggagaacttaaaaatttaccgttattaaacacagataaaccggttcaagctttgatgcgtattgcggatgaattaggagaaatctttaaattcgaggcgcctggtagcgtaacgcgctttttatcaagtcagcgtctaattaaagaagcatgcgatgaatcacgctttgataaaaacttaagtcaaggccttaaatttgcacgtgattttcttggagacgggttatttacaagctggacgcatgaaccgaattggaaaaaagcgcataatatcttaggcccaagctttagtcagcgtgcaatgaaacgttatcatgcgatgatggtcgatatcgccgtgcagcttgttcaaaagtgggagcgtctaaatgcagatgagcatattgaagtatcggaagacatgacacgtttaacgctggatacaattggtctttgcggcttcaactatcgctttaacagcttttaccgagatcagcctcatccatttattgtgagtgtcgtgcgtgcactggatgaagtaatgaacaagctgcagcgagcaaatccagacgacccagcttatgatgaaaacaagcgccagtgtcaagaagatatcaaggtgatgaacgactatgtcgataaaattattgcagatcgcaaagcaaggggtgaacaaagccatgatttattaacgcagatgctaaacggaaaagatccagaaacgggtgagccgcttgatgacgggaacattcgttatcaaattgcgagtttcttaattgcgggacacgaaacaacaagtggtcttttatcatttgcgctgtatttcttagtgaaaaatccacatgtattacaaaaagtagcagaagaagcagcacgagttctagtagatcctgttccaagctacaaacaagtcaaacagcttaaatatgtcggcatggtcttaaacgaagcgctgcgcttatggccaactgctcctgcgttttccctatatgcaaaagaagatacggtgcttggaggagaatatcctttaaccaaaggcgacgaagtaatggttctgattcctcagcttcaccgtgataaaacaatttggggagacgatgtggaggagttccgtccagagcgttttgaaaatccaagtgcgattccgcagcatgcgtttaaaccgtttggaaacggtcagcgtgcgtgtatcggtcagcagttcgctcttcatgaagcaacgctggtacttggtatgatgctaaaacactttgactttgaagatcatacaaactacgagctcgttattaaagaaaagttaacgttaaaacctgaaggctttgtggtaaaagcaaaatcgaaaggcattccgcttggcggtattccttcacctagcactgaacagtctgctaaaaaagtacgcaaaaaggcagaaaacgctcataatacgccgctgcttgtgctatacggttcaaatgcgggaacagctgaaggaacggcgcgtgatttagcagatattgcaatgagcaaaggatttgcaccgcaggtcgcaacgcttgattcacacgccggaaatcttccgcgcgaaggagctgtattaattgtaacggcgtcttataacggtcatccgcctgataacgcaaagcaatttgtcgactggttagaccaagcgtctgctgatgaagtaaaaggcgttcgctactccgtatttggatgcggcgataaaaactgggctgcgacgtatcaaaaagtgcctgcttttatcgatgaaacgcttgccgctaaaggggcagaaaacatcgctgaccgcggtgaagcagatgcaagcgacgactttgaaggcacatatgaagaatggagtgatcatatgtggagtgacgtagcagcctactttaacctcgacattgaaaacagtgaagataataaatctactctttcacttcaatttgtcgacagcgccgcggatatgccgcttgcgaaaatgcacggtgcgttttcaacgaacgtcgtagcaagcaaagaacttcaacagccaggcagtgcacgaagcacgcgacatcttgaaattgaacttccaaaagaagcttcttatcaagaaggagatcatttaggtgttattcctcgcaactatgaaggaatagtaaaccgtgtaacagcaaggttcggcctaagcgcatcacagcaaatccgtctggaagcagaagaagaaaaattagctcatttgccactcgctaaaacagtatccgtagaagagcttctgcaatacgtggagcttcaagatcctgttacgcgcacgcagcttcgcgcaatggctgctaaaacggtctgcccgccgcataaagtagagcttgaagccttgcttgaaaagcaagcctacaaagaacaagtgctggcaaaacgtttaacaatgcttgaactgcttgaaaaatacccggcgtgtgaaatgaaattcagcgaatttatcgcccttctgccaagcatacgcccgcgctattactcgatttcttcatcacctcgtgtcgatgaaaaacaagcaagcatcacggtcagcgttgtctcaggaccggcgtggagcggatatggagaatataaaggaattgcgtcgaactatcttgccgagctgcaagaaggagatacgattacgtgctttatttccacagatcagtcagaatttacgctgccaaaagaccctgaaacgccgcttatcatggtcggaccgggaacaggcgtcgcgccgtttagaggctttgtgcaggcgcgcaaacagctaaaagaacaaggacagtcacttggagaagcacatttatacttcggctgccgttcacctcatgaagactatctgtatcaagaagagcttgaaaacgcccaaagcgaaggcatcattacgcttcataccgctttttctcgcatgccaaatcagccgaaaacatacgttcagcacgtaatggaacaagacggcaagaaattgattgaacttcttgatcaaggagcgcacttctatatttgcggagacggaagccaaatggcacctgccgttgaagcaacgcttatgaaaagctatgctgacgttcaccaagtgagtgaagcagacgctcgcttatggctgcagcagctagaagaaaaaggccgatacgcaaaagacgtgtgggctggg

SEQ ID NO: 280 - protein, 1049 aa, synthetic construct
  REGION 1..1049: note = Variant of cytochrome P450
MTIKEMPQPKTFGELKNLPLLNTDKPVQALMRIADELGEIFKFEAPGSVTRFLSSQRLIKEACDESRFDKNLSQGLKFARDFLGDGLFTSWTHEPNWKKAHNILGPSFSQRAMKRYHAMMVDIAVQLVQKWERLNADEHIEVSEDMTRLTLDTIGLCGFNYRFNSFYRDQPHPFIVSVVRALDEVMNKLQRANPDDPAYDENKRQCQEDIKVMNDYVDKIIADRKARGEQSHDLLTQMLNGKDPETGEPLDDGNIRYQIASFLIAGHETTSGLLSFALYFLVKNPHVLQKVAEEAARVLVDPVPSYKQVKQLKYVGMVLNEALRLWPTAPAFSLYAKEDTVLGGEYPLTKGDEVMVLIPQLHRDKTIWGDDVEEFRPERFENPSAIPQHAFKPFGNGQRACIGQQFALHEATLVLGMMLKHFDFEDHTNYELVIKEKLTLKPEGFVVKAKSKGIPLGGIPSPSTEQSAKKVRKKAENAHNTPLLVLYGSNAGTAEGTARDLADIAMSKGFAPQVATLDSHAGNLPREGAVLIVTASYNGHPPDNAKQFVDWLDQASADEVKGVRYSVFGCGDKNWAATYQKVPAFIDETLAAKGAENIADRGEADASDDFEGTYEEWSDHMWSDVAAYFNLDIENSEDNKSTLSLQFVDSAADMPLAKMHGAFSTNVVASKELQQPGSARSTRHLEIELPKEASYQEGDHLGVIPRNYEGIVNRVTARFGLSASQQIRLEAEEEKLAHLPLAKTVSVEELLQYVELQDPVTRTQLRAMAAKTVCPPHKVELEALLEKQAYKEQVLAKRLTMLELLEKYPACEMKFSEFIALLPSIRPRYYSISSSPRVDEKQASITVSVVSGPAWSGYGEYKGIASNYLAELQEGDTITCFISTDQSEFTLPKDPETPLIMVGPGTGVAPFRGFVQARKQLKEQGQSLGEAHLYFGCRSPHEDYLYQEELENAQSEGIITLHTAFSRMPNQPKTYVQHVMEQDGKKLIELLDQGAHFYICGDGSQMAPAVEATLMKSYADVHQVSEADARLWLQQLEEKGRYAKDVWAG

SEQ ID NO: 281 - DNA, 3147 bp, synthetic construct
  misc_feature 1..3147: note = Variant of cytochrome P450
  source 1..3147: mol_type = other DNA
atgacaattaaggaaatgcctcagcctaagacgtttggagaacttaaaaatttaccgttattaaacacagataaaccggttcaagctttgatgcgtattgcggatgaattaggagagatctttaaattcgaggcgcctggtagcgtaacgcgctttctgtcaagtcagcgtctagtcaaagaagcatgcgatgaatcacgctttgataaaaacttaagtcaaggccttaaatttgcgcgtgcctttcttggagacgggttatttacaagctggacgcatgaaccgaattggaaaaaagcgcataatatcttaggcccaagctttagtcagcgtgcaatgaaacgttatcatgcgatgatggtcgatatcgccgtgcagcttgttcaaaagtgggagcgtctaaatgcagatgagcatattgaagtatcggaagacatgacacgtttaacgctggatacaattggtctttgcggcttcaactatcgctttaacagcttttaccgagatcagcctcatccatttattgtgagtgttgtgcgtgcactggatgaagttatgaacaagctgcagcgagcaaatccagacgacccagcttatgatgaaaacaagcgccagtgtcaagaagatatcaaggtgatgaacgacctggtcgataaaattattgcagatcgcaaagcaaggggtgaacaaagccatgatttattaacgcagatgctaaacggaaaagatccagaaacgggtgagccgcttgatgacgagaacattcgttatcaaattattacattcttaattgcgggacacgaaacaacaagtggtcttttatcatttgcgctgtatttcttagtgaaaaatccacatgtattacaaaaagtagcagaagaagcagcacgagttctagtagatcctgttccaagctacaaacaagtcaaacagcttaaatatgtcggcatggtcttaaacgaagcgctgcgcttatggccaactgctcctgcgttttccctatatgcaaaagaagatacggtgcttggaggagaatatcctttaaccaaaggcgacgaagtaatggttctgattcctcagcttcaccgtgataaaacaatttggggagacgatgtggaggagttccgtccagagcgttttgaaaatccaagtgcgattccgcagcatgcgtttaaaccgtttggaaacggtcagcgtgcgtgtatcggtcagcagttcgctcttcatgaagcaacgctggtacttggtatgatgctaaaacactttgactttgaagatcatacaaactacgagctcgttattaaagaaaagttaacgttaaaacctgaaggctttgtggtaaaagcaaaatcgaaaggcattccgcttggcggtattccttcacctagcactgaacagtctgctaaaaaagtacgcaaaaaggcagaaaacgctcataatacgccgctgcttgtgctatacggttcaaatgcgggaacagctgaaggaacggcgcgtgatttagcagatattgcaatgagcaaaggatttgcaccgcaggtcgcaacgcttgattcacacgccggaaatcttccgcgcgaaggagctgtattaattgtaacggcgtcttataacggtcatccgcctgataacgcaaagcaatttgtcgactggttagaccaagcgtctgctgatgaagtaaaaggcgttcgctactccgtatttggatgcggcgataaaaactgggctgcgacgtatcaaaaagtgcctgcttttatcgatgaaacgcttgccgctaaaggggcagaaaacatcgctgaccgcggtgaagcagatgcaagcgacgactttgaaggcacatatgaagaatggagtgatcatatgtggagtgacgtagcagcctactttaacctcgacattgaaaacagtgaagataataaatctactctttcacttcaatttgtcgacagcgccgcggatatgccgcttgcgaaaatgcacggtgcgttttcaacgaacgtcgtagcaagcaaagaacttcaacagccaggcagtgcacgaagcacgcgacatcttgaaattgaacttccaaaagaagcttcttatcaagaaggagatcatttaggtgttattcctcgcaactatgaaggaatagtaaaccgtgtaacagcaaggttcggcctaagcgcatcacagcaaatccgtctggaagcagaagaagaaaaattagctcatttgccactcgctaaaacagtatccgtagaagagcttctgcaatacgtggagcttcaagatcctgttacgcgcacgcagcttcgcgcaatggctgctaaaacggtctgcccgccgcataaagtagagcttgaagccttgcttgaaaagcaagcctacaaagaacaagtgctggcaaaacgtttaacaatgcttgaactgcttgaaaaatacccggcgtgtgaaatgaaattcagcgaatttatcgcccttctgccaagcatacgcccgcgctattactcgatttcttcatcacctcgtgtcgatgaaaaacaagcaagcatcacggtcagcgttgtctcaggaccggcgtggagcggatatggagaatataaaggaattgcgtcgaactatcttgccgagctgcaagaaggagatacgattacgtgctttatttccacagatcagtcagaatttacgctgccaaaagaccctgaaacgccgcttatcatggtcggaccgggaacaggcgtcgcgccgtttagaggctttgtgcaggcgcgcaaacagctaaaagaacaaggacagtcacttggagaagcacatttatacttcggctgccgttcacctcatgaagactatctgtatcaagaagagcttgaaaacgcccaaagcgaaggcatcattacgcttcataccgctttttctcgcatgccaaatcagccgaaaacatacgttcagcacgtaatggaacaagacggcaagaaattgattgaacttcttgatcaaggagcgcacttctatatttgcggagacggaagccaaatggcacctgccgttgaagcaacgcttatgaaaagctatgctgacgttcaccaagtgagtgaagcagacgctcgcttatggctgcagcagctagaagaaaaaggccgatacgcaaaagacgtgtgggctggg

SEQ ID NO: 282 - protein, 1049 aa, synthetic construct
  REGION 1..1049: note = Variant of cytochrome P450
MTIKEMPQPKTFGELKNLPLLNTDKPVQALMRIADELGEIFKFEAPGSVTRFLSSQRLVKEACDESRFDKNLSQGLKFARAFLGDGLFTSWTHEPNWKKAHNILGPSFSQRAMKRYHAMMVDIAVQLVQKWERLNADEHIEVSEDMTRLTLDTIGLCGFNYRFNSFYRDQPHPFIVSVVRALDEVMNKLQRANPDDPAYDENKRQCQEDIKVMNDLVDKIIADRKARGEQSHDLLTQMLNGKDPETGEPLDDENIRYQIITFLIAGHETTSGLLSFALYFLVKNPHVLQKVAEEAARVLVDPVPSYKQVKQLKYVGMVLNEALRLWPTAPAFSLYAKEDTVLGGEYPLTKGDEVMVLIPQLHRDKTIWGDDVEEFRPERFENPSAIPQHAFKPFGNGQRACIGQQFALHEATLVLGMMLKHFDFEDHTNYELVIKEKLTLKPEGFVVKAKSKGIPLGGIPSPSTEQSAKKVRKKAENAHNTPLLVLYGSNAGTAEGTARDLADIAMSKGFAPQVATLDSHAGNLPREGAVLIVTASYNGHPPDNAKQFVDWLDQASADEVKGVRYSVFGCGDKNWAATYQKVPAFIDETLAAKGAENIADRGEADASDDFEGTYEEWSDHMWSDVAAYFNLDIENSEDNKSTLSLQFVDSAADMPLAKMHGAFSTNVVASKELQQPGSARSTRHLEIELPKEASYQEGDHLGVIPRNYEGIVNRVTARFGLSASQQIRLEAEEEKLAHLPLAKTVSVEELLQYVELQDPVTRTQLRAMAAKTVCPPHKVELEALLEKQAYKEQVLAKRLTMLELLEKYPACEMKFSEFIALLPSIRPRYYSISSSPRVDEKQASITVSVVSGPAWSGYGEYKGIASNYLAELQEGDTITCFISTDQSEFTLPKDPETPLIMVGPGTGVAPFRGFVQARKQLKEQGQSLGEAHLYFGCRSPHEDYLYQEELENAQSEGIITLHTAFSRMPNQPKTYVQHVMEQDGKKLIELLDQGAHFYICGDGSQMAPAVEATLMKSYADVHQVSEADARLWLQQLEEKGRYAKDVWAG

SEQ ID NO: 283 - DNA, 3147 bp, synthetic construct
  misc_feature 1..3147: note = Variant of cytochrome P450
  source 1..3147: mol_type = other DNA
atgacaattaaggaaatgcctcagcctaagacgtttggagaacttaaaaatttaccgttattaaacacagataaaccggttcaagctttgatgcgtattgcggatgaattaggagaaatctttaaattcgaggcgcctggtagcgtaacgcgctttttatcaagtcagcgtctaattaaagaagcatgcgatgaatcacgctttgataaaaacttaagtcaaggccttaaatttgcacgtgatttcggcggagacgtcttagggacaagctggacgcatgaaccgaattggaaaaaagcgcataatatcttaggcccaagctttagtcagcgtgcaatgaaacgttatcatgcgatgatggtcgatatcgccgtgcagcttgttcaaaagtgggagcgtctaaatgcagatgagcatattgaagtatcggaagacatgacacgtttaacgctggatacaattggtctttgcggcttcaactatcgctttaacagcttttaccgagatcagcctcatccatttattgtgagtgtcgtgcgtgcactggatgaagtaatgaacaagctgcagcgagcaaatccagacgacccagcttatgatgaaaacaagcgccagtgtcaagaagacgcgaaggtgatcaacgactatgtcgataaaattattgcagatcgcaaagcaaggggtgaacaaagccatgatttattaacgcagatgctaaacggaaaagatccagaaacgggtgagccgcttgatgacgggaacattcgttatcaaattattacattcttaattgcgggacacgaaacaacaagtggtcttttatcatttgcgctgtatttcttagtgaaaaatccacatgtattacaaaaagtagcagaagaagcagcacgagttctagtagatcctgttccaagctacaaacaagtcaaacagcttaaatatgtcggcatggtcttaaacgaagcgctgcgcttatggccaactgctcctgcgttttccctatatgcaaaagaagatacggtgcttggaggagaatatcctttaaccaaaggcgacgaagtaatggttctgattcctcagcttcaccgtgataaaacaatttggggagacgatgtggaggagttccgtccagagcgttttgaaaatccaagtgcgattccgcagcatgcgtttaaaccgtttggaaacggtcagcgtgcgtgtatcggtcagcagttcgctcttcatgaagcaacgctggtacttggtatgatgctaaaacactttgactttgaagatcatacaaactacgagctcgttattaaagaaaagttaacgttaaaacctgaaggctttgtggtaaaagcaaaatcgaaaggcattccgcttggcggtattccttcacctagcactgaacagtctgctaaaaaagtacgcaaaaaggcagaaaacgctcataatacgccgctgcttgtgctatacggttcaaatgcgggaacagctgaaggaacggcgcgtgatttagcagatattgcaatgagcaaaggatttgcaccgcaggtcgcaacgcttgattcacacgccggaaatcttccgcgcgaaggagctgtattaattgtaacggcgtcttataacggtcatccgcctgataacgcaaagcaatttgtcgactggttagaccaagcgtctgctgatgaagtaaaaggcgttcgctactccgtatttggatgcggcgataaaaactgggctgcgacgtatcaaaaagtgcctgcttttatcgatgaaacgcttgccgctaaaggggcagaaaacatcgctgaccgcggtgaagcagatgcaagcgacgactttgaaggcacatatgaagaatggagtgatcatatgtggagtgacgtagcagcctactttaacctcgacattgaaaacagtgaagataataaatctactctttcacttcaatttgtcgacagcgccgcggatatgccgcttgcgaaaatgcacggtgcgttttcaacgaacgtcgtagcaagcaaagaacttcaacagccaggcagtgcacgaagcacgcgacatcttgaaattgaacttccaaaagaagcttcttatcaagaaggagatcatttaggtgttattcctcgcaactatgaaggaatagtaaaccgtgtaacagcaaggttcggcctaagcgcatcacagcaaatccgtctggaagcagaagaagaaaaattagctcatttgccactcgctaaaacagtatccgtagaagagcttctgcaatacgtggagcttcaagatcctgttacgcgcacgcagcttcgcgcaatggctgctaaaacggtctgcccgccgcataaagtagagcttgaagccttgcttgaaaagcaagcctacaaagaacaagtgctggcaaaacgtttaacaatgcttgaactgcttgaaaaatacccggcgtgtgaaatgaaattcagcgaatttatcgcccttctgccaagcatacgcccgcgctattactcgatttcttcatcacctcgtgtcgatgaaaaacaagcaagcatcacggtcagcgttgtctcaggaccggcgtggagcggatatggagaatataaaggaattgcgtcgaactatcttgccgagctgcaagaaggagatacgattacgtgctttatttccacagatcagtcagaatttacgctgccaaaagaccctgaaacgccgcttatcatggtcggaccgggaacaggcgtcgcgccgtttagaggctttgtgcaggcgcgcaaacagctaaaagaacaaggacagtcacttggagaagcacatttatacttcggctgccgttcacctcatgaagactatctgtatcaagaagagcttgaaaacgcccaaagcgaaggcatcattacgcttcataccgctttttctcgcatgccaaatcagccgaaaacatacgttcagcacgtaatggaacaagacggcaagaaattgattgaacttcttgatcaaggagcgcacttctatatttgcggagacggaagccaaatggcacctgccgttgaagcaacgcttatgaaaagctatgctgacgttcaccaagtgagtgaagcagacgctcgcttatggctgcagcagctagaagaaaaaggccgatacgcaaaagacgtgtgggctggg

SEQ ID NO: 284 - protein, 1049 aa, synthetic construct
  REGION 1..1049: note = Variant of cytochrome P450
MTIKEMPQPKTFGELKNLPLLNTDKPVQALMRIADELGEIFKFEAPGSVTRFLSSQRLIKEACDESRFDKNLSQGLKFARDFGGDVLGTSWTHEPNWKKAHNILGPSFSQRAMKRYHAMMVDIAVQLVQKWERLNADEHIEVSEDMTRLTLDTIGLCGFNYRFNSFYRDQPHPFIVSVVRALDEVMNKLQRANPDDPAYDENKRQCQEDAKVINDYVDKIIADRKARGEQSHDLLTQMLNGKDPETGEPLDDGNIRYQIITFLIAGHETTSGLLSFALYFLVKNPHVLQKVAEEAARVLVDPVPSYKQVKQLKYVGMVLNEALRLWPTAPAFSLYAKEDTVLGGEYPLTKGDEVMVLIPQLHRDKTIWGDDVEEFRPERFENPSAIPQHAFKPFGNGQRACIGQQFALHEATLVLGMMLKHFDFEDHTNYELVIKEKLTLKPEGFVVKAKSKGIPLGGIPSPSTEQSAKKVRKKAENAHNTPLLVLYGSNAGTAEGTARDLADIAMSKGFAPQVATLDSHAGNLPREGAVLIVTASYNGHPPDNAKQFVDWLDQASADEVKGVRYSVFGCGDKNWAATYQKVPAFIDETLAAKGAENIADRGEADASDDFEGTYEEWSDHMWSDVAAYFNLDIENSEDNKSTLSLQFVDSAADMPLAKMHGAFSTNVVASKELQQPGSARSTRHLEIELPKEASYQEGDHLGVIPRNYEGIVNRVTARFGLSASQQIRLEAEEEKLAHLPLAKTVSVEELLQYVELQDPVTRTQLRAMAAKTVCPPHKVELEALLEKQAYKEQVLAKRLTMLELLEKYPACEMKFSEFIALLPSIRPRYYSISSSPRVDEKQASITVSVVSGPAWSGYGEYKGIASNYLAELQEGDTITCFISTDQSEFTLPKDPETPLIMVGPGTGVAPFRGFVQARKQLKEQGQSLGEAHLYFGCRSPHEDYLYQEELENAQSEGIITLHTAFSRMPNQPKTYVQHVMEQDGKKLIELLDQGAHFYICGDGSQMAPAVEATLMKSYADVHQVSEADARLWLQQLEEKGRYAKDVWAG

SEQ ID NO: 285 - DNA, 3147 bp, synthetic construct
  misc_feature 1..3147: note = Variant of cytochrome P450
  source 1..3147: mol_type = other DNA
atgacaattaaggaaatgcctcagcctaagacgtttggagaacttaaaaatttaccgttattaaacacagataaaccggttcaagctttgatgcgtattgcggatgaattaggagaaatctttaaattcgaggcgcctggtagcgtaacgcgctttttatcaagtcagcgtctaattaaagaagcatgcgatgaatcacgctttgataaaaacttaagtcaagctctgaaatttgggcgtgattttctgggagacgggttatttacaagctggacgcatgaaccgaattggaaaaaagcgcataatatcttaggcccaagctttagtcagcgtgcaatgaaacgttatcatgcgatgatggtcgatatcgccgtgcagcttgttcaaaagtgggagcgtctaaatgcagatgagcatattgaagtatcggaagacatgacacgtttaacgctggatacaattggtctttgcggcttcaactatcgctttaacagcttttaccgagatcagcctcatccatttattgtgagtgttgtgcgtgcactggatgaagtaatgaacaagctgcagcgagcaaatccagacgacccagcttatgatgaaaacaagcgccagtgtcaagaagatatcaaggtgatgaacgactatgtcgataaaattattgcagatcgcaaagcaaggggtgaacaaagccatgatttattaacgcagatgctaaacggaaaagatccagaaacgggtgagccgcttgatgacgggaacattcgttatcaaattattacattcttaatcgcgggacacgaaacaacaagtggtcttttatcatttgcgctgtatttcttagtgaaaaatccacatgtattacaaaaagtagcagaagaagcagcacgagttctagtagatcctgttccaagctacaaacaagtcaaacagcttaaatatgtcggcatggtcttaaacgaagcgctgcgcttatggccaactggtcctgcgttttccctatatgcaaaagaagatacggtgcttggaggagaatatcctttaaccaaaggcgacgaagtaatggttctgattcctcagcttcaccgtgataaaacaatttggggagacgatgtggaggagttccgtccagagcgttttgaaaatccaagtgcgattccgcagcatgcgtttaaaccgtttggaaacggtcagcgtgcgtgtatcggtcagcagttcgctcttcatgaagcaacgctggtacttggtatgatgctaaaacactttgactttgaagatcatacaaactacgagctcgttattaaagaaaagttaacgttaaaacctgaaggctttgtggtaaaagcaaaatcgaaaggcattccgcttggcggtattccttcacctagcactgaacagtctgctaaaaaagtacgcaaaaaggcagaaaacgctcataatacgccgctgcttgtgctatacggttcaaatgcgggaacagctgaaggaacggcgcgtgatttagcagatattgcaatgagcaaaggatttgcaccgcaggtcgcaacgcttgattcacacgccggaaatcttccgcgcgaaggagctgtattaattgtaacggcgtcttataacggtcatccgcctgataacgcaaagcaatttgtcgactggttagaccaagcgtctgctgatgaagtaaaaggcgttcgctactccgtatttggatgcggcgataaaaactgggctgcgacgtatcaaaaagtgcctgcttttatcgatgaaacgcttgccgctaaaggggcagaaaacatcgctgaccgcggtgaagcagatgcaagcgacgactttgaaggcacatatgaagaatggagtgatcatatgtggagtgacgtagcagcctactttaacctcgacattgaaaacagtgaagataataaatctactctttcacttcaatttgtcgacagcgccgcggatatgccgcttgcgaaaatgcacggtgcgttttcaacgaacgtcgtagcaagcaaagaacttcaacagccaggcagtgcacgaagcacgcgacatcttgaaattgaacttccaaaagaagcttcttatcaagaaggagatcatttaggtgttattcctcgcaactatgaaggaatagtaaaccgtgtaacagcaaggttcggcctaagcgcatcacagcaaatccgtctggaagcagaagaagaaaaattagctcatttgccactcgctaaaacagtatccgtagaagagcttctgcaatacgtggagcttcaagatcctgttacgcgcacgcagcttcgcgcaatggctgctaaaacggtctgcccgccgcataaagtagagcttgaagccttgcttgaaaagcaagcctacaaagaacaagtgctggcaaaacgtttaacaatgcttgaactgcttgaaaaatacccggcgtgtgaaatgaaattcagcgaatttatcgcccttctgccaagcatacgcccgcgctattactcgatttcttcatcacctcgtgtcgatgaaaaacaagcaagcatcacggtcagcgttgtctcaggaccggcgtggagcggatatggagaatataaaggaattgcgtcgaactatcttgccgagctgcaagaaggagatacgattacgtgctttatttccacagatcagtcagaatttacgctgccaaaagaccctgaaacgccgcttatcatggtcggaccgggaacaggcgtcgcgccgtttagaggctttgtgcaggcgcgcaaacagctaaaagaacaaggacagtcacttggagaagcacatttatacttcggctgccgttcacctcatgaagactatctgtatcaagaagagcttgaaaacgcccaaagcgaaggcatcattacgcttcataccgctttttctcgcatgccaaatcagccgaaaacatacgttcagcacgtaatggaacaagacggcaagaaattgattgaacttcttgatcaaggagcgcacttctatatttgcggagacggaagccaaatggcacctgccgttgaagcaacgcttatgaaaagctatgctgacgttcaccaagtgagtgaagcagacgctcgcttatggctgcagcagctagaagaaaaaggccgatacgcaaaagacgtgtgggctggg

SEQ ID NO: 286 - protein, 1049 aa, synthetic construct
  REGION 1..1049: note = Variant of cytochrome P450
MTIKEMPQPKTFGELKNLPLLNTDKPVQALMRIADELGEIFKFEAPGSVTRFLSSQRLIKEACDESRFDKNLSQALKFGRDFLGDGLFTSWTHEPNWKKAHNILGPSFSQRAMKRYHAMMVDIAVQLVQKWERLNADEHIEVSEDMTRLTLDTIGLCGFNYRFNSFYRDQPHPFIVSVVRALDEVMNKLQRANPDDPAYDENKRQCQEDIKVMNDYVDKIIADRKARGEQSHDLLTQMLNGKDPETGEPLDDGNIRYQIITFLIAGHETTSGLLSFALYFLVKNPHVLQKVAEEAARVLVDPVPSYKQVKQLKYVGMVLNEALRLWPTGPAFSLYAKEDTVLGGEYPLTKGDEVMVLIPQLHRDKTIWGDDVEEFRPERFENPSAIPQHAFKPFGNGQRACIGQQFALHEATLVLGMMLKHFDFEDHTNYELVIKEKLTLKPEGFVVKAKSKGIPLGGIPSPSTEQSAKKVRKKAENAHNTPLLVLYGSNAGTAEGTARDLADIAMSKGFAPQVATLDSHAGNLPREGAVLIVTASYNGHPPDNAKQFVDWLDQASADEVKGVRYSVFGCGDKNWAATYQKVPAFIDETLAAKGAENIADRGEADASDDFEGTYEEWSDHMWSDVAAYFNLDIENSEDNKSTLSLQFVDSAADMPLAKMHGAFSTNVVASKELQQPGSARSTRHLEIELPKEASYQEGDHLGVIPRNYEGIVNRVTARFGLSASQQIRLEAEEEKLAHLPLAKTVSVEELLQYVELQDPVTRTQLRAMAAKTVCPPHKVELEALLEKQAYKEQVLAKRLTMLELLEKYPACEMKFSEFIALLPSIRPRYYSISSSPRVDEKQASITVSVVSGPAWSGYGEYKGIASNYLAELQEGDTITCFISTDQSEFTLPKDPETPLIMVGPGTGVAPFRGFVQARKQLKEQGQSLGEAHLYFGCRSPHEDYLYQEELENAQSEGIITLHTAFSRMPNQPKTYVQHVMEQDGKKLIELLDQGAHFYICGDGSQMAPAVEATLMKSYADVHQVSEADARLWLQQLEEKGRYAKDVWAG

SEQ ID NO: 287 - DNA, 3147 bp, synthetic construct
  misc_feature 1..3147: note = Variant of cytochrome P450
  source 1..3147: mol_type = other DNA
atgacaattaaggaaatgcctcagcctaagacgtttggagaacttaaaaatttaccgttattaaacacagataaaccggttcaagctttgatgcgtattgcggatgaattaggagaaatctttaaattcgaggcgcctggtagcgtaacgcgctttttatcaagtcagcgtctaattaaagaagcatgcgatgaatcacgctttgataaaaacttaagtcaatcgctgaaatttgggcgtgattttctgggagacgggttatttacaagctggacgcatgaaccgaattggaaaaaagcgcataatatcttaggcccaagctttagtcagcgtgcaatgaaacgttatcatgcgatgatggtcgatatcgccgtgcagcttgttcaaaagtgggagcgtctaaatgcagatgagcatattgaagtatcggaagacatgacacgtttaacgctggatacaattggtctttgcggcttcaactatcgctttaacagcttttaccgagatcagcctcatccatttattgtgagtgttgtgcgtgcactggatgaagtaatgaacaagctgcagcgagcaaatccagacgacccagcttatgatgaaaacaagcgccagtgtcaagaagatatcaaggtgatgaacgactatgtcgataaaattattgcagatcgcaaagcaaggggtgaacaaagccatgatttattaacgcagatgctaaacggaaaagatccagaaacgggtgagccgcttgatgacgggaacattcgttatcaaattattacattcttaatcgcgggacacgaaacaacaagtggtcttttatcatttgcgctgtatttcttagtgaaaaatccacatgtattacaaaaagtagcagaagaagcagcacgagttctagtagatcctgttccaagctacaaacaagtcaaacagcttaaatatgtcggcatggtcttaaacgaagcgctgcgcttatggccaactggtcctgcgttttccctatatgcaaaagaagatacggtgcttggaggagaatatcctttaaccaaaggcgacgaagtaatggttctgattcctcagcttcaccgtgataaaacaatttggggagacgatgtggaggagttccgtccagagcgttttgaaaatccaagtgcgattccgcagcatgcgtttaaaccgtttggaaacggtcagcgtgcgtgtatcggtcagcagttcgctcttcatgaagcaacgctggtacttggtatgatgctaaaacactttgactttgaagatcatacaaactacgagctcgttattaaagaaaagttaacgttaaaacctgaaggctttgtggtaaaagcaaaatcgaaaggcattccgcttggcggtattccttcacctagcactgaacagtctgctaaaaaagtacgcaaaaaggcagaaaacgctcataatacgccgctgcttgtgctatacggttcaaatgcgggaacagctgaaggaacggcgcgtgatttagcagatattgcaatgagcaaaggatttgcaccgcaggtcgcaacgcttgattcacacgccggaaatcttccgcgcgaaggagctgtattaattgtaacggcgtcttataacggtcatccgcctgataacgcaaagcaatttgtcgactggttagaccaagcgtctgctgatgaagtaaaaggcgttcgctactccgtatttggatgcggcgataaaaactgggctgcgacgtatcaaaaagtgcctgcttttatcgatgaaacgcttgccgctaaaggggcagaaaacatcgctgaccgcggtgaagcagatgcaagcgacgactttgaaggcacatatgaagaatggagtgatcatatgtggagtgacgtagcagcctactttaacctcgacattgaaaacagtgaagataataaatctactctttcacttcaatttgtcgacagcgccgcggatatgccgcttgcgaaaatgcacggtgcgttttcaacgaacgtcgtagcaagcaaagaacttcaacagccaggcagtgcacgaagcacgcgacatcttgaaattgaacttccaaaagaagcttcttatcaagaaggagatcatttaggtgttattcctcgcaactatgaaggaatagtaaaccgtgtaacagcaaggttcggcctaagcgcatcacagcaaatccgtctggaagcagaagaagaaaaattagctcatttgccactcgctaaaacagtatccgtagaagagcttctgcaatacgtggagcttcaagatcctgttacgcgcacgcagcttcgcgcaatggctgctaaaacggtctgcccgccgcataaagtagagcttgaagccttgcttgaaaagcaagcctacaaagaacaagtgctggcaaaacgtttaacaatgcttgaactgcttgaaaaatacccggcgtgtgaaatgaaattcagcgaatttatcgcccttctgccaagcatacgcccgcgctattactcgatttcttcatcacctcgtgtcgatgaaaaacaagcaagcatcacggtcagcgttgtctcaggaccggcgtggagcggatatggagaatataaaggaattgcgtcgaactatcttgccgagctgcaagaaggagatacgattacgtgctttatttccacagatcagtcagaatttacgctgccaaaagaccctgaaacgccgcttatcatggtcggaccgggaacaggcgtcgcgccgtttagaggctttgtgcaggcgcgcaaacagctaaaagaacaaggacagtcacttggagaagcacatttatacttcggctgccgttcacctcatgaagactatctgtatcaagaagagcttgaaaacgcccaaagcgaaggcatcattacgcttcataccgctttttctcgcatgccaaatcagccgaaaacatacgttcagcacgtaatggaacaagacggcaagaaattgattgaacttcttgatcaaggagcgcacttctatatttgcggagacggaagccaaatggcacctgccgttgaagcaacgcttatgaaaagctatgctgacgttcaccaagtgagtgaagcagacgctcgcttatggctgcagcagctagaagaaaaaggccgatacgcaaaagacgtgtgggctggg

SEQ ID NO: 288 - protein, 1049 aa, synthetic construct
  REGION 1..1049: note = Variant of cytochrome P450
MTIKEMPQPKTFGELKNLPLLNTDKPVQALMRIADELGEIFKFEAPGSVTRFLSSQRLIKEACDESRFDKNLSQSLKFGRDFLGDGLFTSWTHEPNWKKAHNILGPSFSQRAMKRYHAMMVDIAVQLVQKWERLNADEHIEVSEDMTRLTLDTIGLCGFNYRFNSFYRDQPHPFIVSVVRALDEVMNKLQRANPDDPAYDENKRQCQEDIKVMNDYVDKIIADRKARGEQSHDLLTQMLNGKDPETGEPLDDGNIRYQIITFLIAGHETTSGLLSFALYFLVKNPHVLQKVAEEAARVLVDPVPSYKQVKQLKYVGMVLNEALRLWPTGPAFSLYAKEDTVLGGEYPLTKGDEVMVLIPQLHRDKTIWGDDVEEFRPERFENPSAIPQHAFKPFGNGQRACIGQQFALHEATLVLGMMLKHFDFEDHTNYELVIKEKLTLKPEGFVVKAKSKGIPLGGIPSPSTEQSAKKVRKKAENAHNTPLLVLYGSNAGTAEGTARDLADIAMSKGFAPQVATLDSHAGNLPREGAVLIVTASYNGHPPDNAKQFVDWLDQASADEVKGVRYSVFGCGDKNWAATYQKVPAFIDETLAAKGAENIADRGEADASDDFEGTYEEWSDHMWSDVAAYFNLDIENSEDNKSTLSLQFVDSAADMPLAKMHGAFSTNVVASKELQQPGSARSTRHLEIELPKEASYQEGDHLGVIPRNYEGIVNRVTARFGLSASQQIRLEAEEEKLAHLPLAKTVSVEELLQYVELQDPVTRTQLRAMAAKTVCPPHKVELEALLEKQAYKEQVLAKRLTMLELLEKYPACEMKFSEFIALLPSIRPRYYSISSSPRVDEKQASITVSVVSGPAWSGYGEYKGIASNYLAELQEGDTITCFISTDQSEFTLPKDPETPLIMVGPGTGVAPFRGFVQARKQLKEQGQSLGEAHLYFGCRSPHEDYLYQEELENAQSEGIITLHTAFSRMPNQPKTYVQHVMEQDGKKLIELLDQGAHFYICGDGSQMAPAVEATLMKSYADVHQVSEADARLWLQQLEEKGRYAKDVWAG

SEQ ID NO: 289 - DNA, 3147 bp, synthetic construct
  misc_feature 1..3147: note = Variant of cytochrome P450
  source 1..3147: mol_type = other DNA
atgacaattaaggaaatgcctcagcctaagacgtttggagaacttaaaaatttaccgttattaaacacagataaaccggttcaagctttgatgcgtattgcggatgaattaggagaaatctttaaattcgaggcgcctggtagcgtaacgcgctttttatcaagtcagcgtctaattaaagaagcatgcgatgaatcacgctttgataaaaacttaagtcaaggcctgaaatttgggcgtgattttctgggagacgggttatttacaagctggacgcatgaaccgaattggaaaaaagcgcataatatcttaggcccaagctttagtcagcgtgcaatgaaacgttatcatgcgatgatggtcgatatcgccgtgcagcttgttcaaaagtgggagcgtctaaatgcagatgagcatattgaagtatcggaagacatgacacgtttaacgctggatacaattggtctttgcggcttcaactatcgctttaacagcttttaccgagatcagcctcatccatttattgtgagtgttgtgcgtgcactggatgaacttatgaacaagctgcagcgagcaaatccagacgacccagcttatgatgaaaacaagcgccagtgtcaagaagatatcaaggtgatgaacgactatgtcgataaaattattgcagatcgcaaagcaaggggtgaacaaagccatgatttattaacgcagatgctaaacggaaaagatccagaaacgggtgagccgcttgatgacgggaacattcgttatcaaattattacattcttaatcgcgggacacgaaacaacaagtggtcttttatcatttgcgctgtatttcttagtgaaaaatccacatgtattacaaaaagtagcagaagaagcagcacgagttctagtagatcctgttccaagctacaaacaagtcaaacagcttaaatatgtcggcatggtcttaaacgaagcgctgcgcttatggccaactggtcctgcgttttccctatatgcaaaagaagatacggtgcttggaggagaatatcctttaaccaaaggcgacgaagtaatggttctgattcctcagcttcaccgtgataaaacaatttggggagacgatgtggaggagttccgtccagagcgttttgaaaatccaagtgcgattccgcagcatgcgtttaaaccgtttggaaacggtcagcgtgcgtgtatcggtcagcagttcgctcttcatgaagcaacgctggtacttggtatgatgctaaaacactttgactttgaagatcatacaaactacgagctcgttattaaagaaaagttaacgttaaaacctgaaggctttgtggtaaaagcaaaatcgaaaggcattccgcttggcggtattccttcacctagcactgaacagtctgctaaaaaagtacgcaaaaaggcagaaaacgctcataatacgccgctgcttgtgctatacggttcaaatgcgggaacagctgaaggaacggcgcgtgatttagcagatattgcaatgagcaaaggatttgcaccgcaggtcgcaacgcttgattcacacgccggaaatcttccgcgcgaaggagctgtattaattgtaacggcgtcttataacggtcatccgcctgataacgcaaagcaatttgtcgactggttagaccaagcgtctgctgatgaagtaaaaggcgttcgctactccgtatttggatgcggcgataaaaactgggctgcgacgtatcaaaaagtgcctgcttttatcgatgaaacgcttgccgctaaaggggcagaaaacatcgctgaccgcggtgaagcagatgcaagcgacgactttgaaggcacatatgaagaatggagtgatcatatgtggagtgacgtagcagcctactttaacctcgacattgaaaacagtgaagataataaatctactctttcacttcaatttgtcgacagcgccgcggatatgccgcttgcgaaaatgcacggtgcgttttcaacgaacgtcgtagcaagcaaagaacttcaacagccaggcagtgcacgaagcacgcgacatcttgaaattgaacttccaaaagaagcttcttatcaagaaggagatcatttaggtgttattcctcgcaactatgaaggaatagtaaaccgtgtaacagcaaggttcggcctaagcgcatcacagcaaatccgtctggaagcagaagaagaaaaattagctcatttgccactcgctaaaacagtatccgtagaagagcttctgcaatacgtggagcttcaagatcctgttacgcgcacgcagcttcgcgcaatggctgctaaaacggtctgcccgccgcataaagtagagcttgaagccttgcttgaaaagcaagcctacaaagaacaagtgctggcaaaacgtttaacaatgcttgaactgcttgaaaaatacccggcgtgtgaaatgaaattcagcgaatttatcgcccttctgccaagcatacgcccgcgctattactcgatttcttcatcacctcgtgtcgatgaaaaacaagcaagcatcacggtcagcgttgtctcaggaccggcgtggagcggatatggagaatataaaggaattgcgtcgaactatcttgccgagctgcaagaaggagatacgattacgtgctttatttccacagatcagtcagaatttacgctgccaaaagaccctgaaacgccgcttatcatggtcggaccgggaacaggcgtcgcgccgtttagaggctttgtgcaggcgcgcaaacagctaaaagaacaaggacagtcacttggagaagcacatttatacttcggctgccgttcacctcatgaagactatctgtatcaagaagagcttgaaaacgcccaaagcgaaggcatcattacgcttcataccgctttttctcgcatgccaaatcagccgaaaacatacgttcagcacgtaatggaacaagacggcaagaaattgattgaacttcttgatcaaggagcgcacttctatatttgcggagacggaagccaaatggcacctgccgttgaagcaacgcttatgaaaagctatgctgacgttcaccaagtgagtgaagcagacgctcgcttatggctgcagcagctagaagaaaaaggccgatacgcaaaagacgtgtgggctggg

SEQ ID NO: 290 - protein, 1049 aa, synthetic construct
  REGION 1..1049: note = Variant of cytochrome P450
MTIKEMPQPKTFGELKNLPLLNTDKPVQALMRIADELGEIFKFEAPGSVTRFLSSQRLIKEACDESRFDKNLSQGLKFGRDFLGDGLFTSWTHEPNWKKAHNILGPSFSQRAMKRYHAMMVDIAVQLVQKWERLNADEHIEVSEDMTRLTLDTIGLCGFNYRFNSFYRDQPHPFIVSVVRALDELMNKLQRANPDDPAYDENKRQCQEDIKVMNDYVDKIIADRKARGEQSHDLLTQMLNGKDPETGEPLDDGNIRYQIITFLIAGHETTSGLLSFALYFLVKNPHVLQKVAEEAARVLVDPVPSYKQVKQLKYVGMVLNEALRLWPTGPAFSLYAKEDTVLGGEYPLTKGDEVMVLIPQLHRDKTIWGDDVEEFRPERFENPSAIPQHAFKPFGNGQRACIGQQFALHEATLVLGMMLKHFDFEDHTNYELVIKEKLTLKPEGFVVKAKSKGIPLGGIPSPSTEQSAKKVRKKAENAHNTPLLVLYGSNAGTAEGTARDLADIAMSKGFAPQVATLDSHAGNLPREGAVLIVTASYNGHPPDNAKQFVDWLDQASADEVKGVRYSVFGCGDKNWAATYQKVPAFIDETLAAKGAENIADRGEADASDDFEGTYEEWSDHMWSDVAAYFNLDIENSEDNKSTLSLQFVDSAADMPLAKMHGAFSTNVVASKELQQPGSARSTRHLEIELPKEASYQEGDHLGVIPRNYEGIVNRVTARFGLSASQQIRLEAEEEKLAHLPLAKTVSVEELLQYVELQDPVTRTQLRAMAAKTVCPPHKVELEALLEKQAYKEQVLAKRLTMLELLEKYPACEMKFSEFIALLPSIRPRYYSISSSPRVDEKQASITVSVVSGPAWSGYGEYKGIASNYLAELQEGDTITCFISTDQSEFTLPKDPETPLIMVGPGTGVAPFRGFVQARKQLKEQGQSLGEAHLYFGCRSPHEDYLYQEELENAQSEGIITLHTAFSRMPNQPKTYVQHVMEQDGKKLIELLDQGAHFYICGDGSQMAPAVEATLMKSYADVHQVSEADARLWLQQLEEKGRYAKDVWAG

SEQ ID NO: 291 - DNA, 3147 bp, synthetic construct
  misc_feature 1..3147: note = Variant of cytochrome P450
  source 1..3147: mol_type = other DNA
atgacaattaaggaaatgcctcagcctaagacgtttggagaacttaaaaatttaccgttattaaacacagataaaccggttcaagctttgatgcgtattgcggatgaattaggagaaatctttaaattcgaggcgcctggtagcgtaacgcgctttttatcaagtcagcgtctaattaaagaagcatgcgatgaatcacgctttgataaaaacttaagtcaaggcctgaaatttgggcgtgattttctgggagacgggttatttacaagctggacgcatgaaccgaattggaaaaaagcgcataatatcttaggcccaagctttagtcagcgtgcaatgaaacgttatcatgcgatgatggtcgatatcgccgtgcagcttgttcaaaagtgggagcgtctaaatgcagatgagcatattgaagtatcggaagacatgacacgtttaacgctggatacaattggtctttgcggcttcaactatcgctttaacagcttttaccgagatcagcctcatccatttattgtgagtgttgtgcgtttgctggatgaagtaatgaacaagctgcagcgagcaaatccagacgacccagcttatgatgaaaacaagcgccagtgtcaagaagatatcaaggtgatgaacgactatgtcgataaaattattgcagatcgcaaagcaaggggtgaacaaagccatgatttattaacgcagatgctaaacggaaaagatccagaaacgggtgagccgcttgatgacgggaacattcgttatcaaattattacattcttaatcgcgggacacgaaacaacaagtggtcttttatcatttgcgctgtatttcttagtgaaaaatccacatgtattacaaaaagtagcagaagaagcagcacgagttctagtagatcctgttccaagctacaaacaagtcaaacagcttaaatatgtcggcatggtcttaaacgaagcgctgcgcttatggccaactggtcctgcgttttccctatatgcaaaagaagatacggtgcttggaggagaatatcctttaaccaaaggcgacgaagtaatggttctgattcctcagcttcaccgtgataaaacaatttggggagacgatgtggaggagttccgtccagagcgttttgaaaatccaagtgcgattccgcagcatgcgtttaaaccgtttggaaacggtcagcgtgcgtgtatcggtcagcagttcgctcttcatgaagcaacgctggtacttggtatgatgctaaaacactttgactttgaagatcatacaaactacgagctcgttattaaagaaaagttaacgttaaaacctgaaggctttgtggtaaaagcaaaatcgaaaggcattccgcttggcggtattccttcacctagcactgaacagtctgctaaaaaagtacgcaaaaaggcagaaaacgctcataatacgccgctgcttgtgctatacggttcaaatgcgggaacagctgaaggaacggcgcgtgatttagcagatattgcaatgagcaaaggatttgcaccgcaggtcgcaacgcttgattcacacgccggaaatcttccgcgcgaaggagctgtattaattgtaacggcgtcttataacggtcatccgcctgataacgcaaagcaatttgtcgactggttagaccaagcgtctgctgatgaagtaaaaggcgttcgctactccgtatttggatgcggcgataaaaactgggctgcgacgtatcaaaaagtgcctgcttttatcgatgaaacgcttgccgctaaaggggcagaaaacatcgctgaccgcggtgaagcagatgcaagcgacgactttgaaggcacatatgaagaatggagtgatcatatgtggagtgacgtagcagcctactttaacctcgacattgaaaacagtgaagataataaatctactctttcacttcaatttgtcgacagcgccgcggatatgccgcttgcgaaaatgcacggtgcgttttcaacgaacgtcgtagcaagcaaagaacttcaacagccaggcagtgcacgaagcacgcgacatcttgaaattgaacttccaaaagaagcttcttatcaagaaggagatcatttaggtgttattcctcgcaactatgaaggaatagtaaaccgtgtaacagcaaggttcggcctaagcgcatcacagcaaatccgtctggaagcagaagaagaaaaattagctcatttgccactcgctaaaacagtatccgtagaagagcttctgcaatacgtggagcttcaagatcctgttacgcgcacgcagcttcgcgcaatggctgctaaaacggtctgcccgccgcataaagtagagcttgaagccttgcttgaaaagcaagcctacaaagaacaagtgctggcaaaacgtttaacaatgcttgaactgcttgaaaaatacccggcgtgtgaaatgaaattcagcgaatttatcgcccttctgccaagcatacgcccgcgctattactcgatttcttcatcacctcgtgtcgatgaaaaacaagcaagcatcacggtcagcgttgtctcaggaccggcgtggagcggatatggagaatataaaggaattgcgtcgaactatcttgccgagctgcaagaaggagatacgattacgtgctttatttccacagatcagtcagaatttacgctgccaaaagaccctgaaacgccgcttatcatggtcggaccgggaacaggcgtcgcgccgtttagaggctttgtgcaggcgcgcaaacagctaaaagaacaaggacagtcacttggagaagcacatttatacttcggctgccgttcacctcatgaagactatctgtatcaagaagagcttgaaaacgcccaaagcgaaggcatcattacgcttcataccgctttttctcgcatgccaaatcagccgaaaacatacgttcagcacgtaatggaacaagacggcaagaaattgattgaacttcttgatcaaggagcgcacttctatatttgcggagacggaagccaaatggcacctgccgttgaagcaacgcttatgaaaagctatgctgacgttcaccaagtgagtgaagcagacgctcgcttatggctgcagcagctagaagaaaaaggccgatacgcaaaagacgtgtgggctggg

SEQ ID NO: 292 - protein, 1049 aa, synthetic construct
  REGION 1..1049: note = Variant of cytochrome P450
MTIKEMPQPKTFGELKNLPLLNTDKPVQALMRIADELGEIFKFEAPGSVTRFLSSQRLIKEACDESRFDKNLSQGLKFGRDFLGDGLFTSWTHEPNWKKAHNILGPSFSQRAMKRYHAMMVDIAVQLVQKWERLNADEHIEVSEDMTRLTLDTIGLCGFNYRFNSFYRDQPHPFIVSVVRLLDEVMNKLQRANPDDPAYDENKRQCQEDIKVMNDYVDKIIADRKARGEQSHDLLTQMLNGKDPETGEPLDDGNIRYQIITFLIAGHETTSGLLSFALYFLVKNPHVLQKVAEEAARVLVDPVPSYKQVKQLKYVGMVLNEALRLWPTGPAFSLYAKEDTVLGGEYPLTKGDEVMVLIPQLHRDKTIWGDDVEEFRPERFENPSAIPQHAFKPFGNGQRACIGQQFALHEATLVLGMMLKHFDFEDHTNYELVIKEKLTLKPEGFVVKAKSKGIPLGGIPSPSTEQSAKKVRKKAENAHNTPLLVLYGSNAGTAEGTARDLADIAMSKGFAPQVATLDSHAGNLPREGAVLIVTASYNGHPPDNAKQFVDWLDQASADEVKGVRYSVFGCGDKNWAATYQKVPAFIDETLAAKGAENIADRGEADASDDFEGTYEEWSDHMWSDVAAYFNLDIENSEDNKSTLSLQFVDSAADMPLAKMHGAFSTNVVASKELQQPGSARSTRHLEIELPKEASYQEGDHLGVIPRNYEGIVNRVTARFGLSASQQIRLEAEEEKLAHLPLAKTVSVEELLQYVELQDPVTRTQLRAMAAKTVCPPHKVELEALLEKQAYKEQVLAKRLTMLELLEKYPACEMKFSEFIALLPSIRPRYYSISSSPRVDEKQASITVSVVSGPAWSGYGEYKGIASNYLAELQEGDTITCFISTDQSEFTLPKDPETPLIMVGPGTGVAPFRGFVQARKQLKEQGQSLGEAHLYFGCRSPHEDYLYQEELENAQSEGIITLHTAFSRMPNQPKTYVQHVMEQDGKKLIELLDQGAHFYICGDGSQMAPAVEATLMKSYADVHQVSEADARLWLQQLEEKGRYAKDVWAG

SEQ ID NO: 293 - DNA, 3147 bp, synthetic construct
  misc_feature 1..3147: note = Variant of cytochrome P450
  source 1..3147: mol_type = other DNA
atgacaattaaggaaatgcctcagcctaagacgtttggagaacttaaaaatttaccgttattaaacacagataaaccggttcaagctttgatgcgtattgcggatgaattaggagaaatctttaaattcgaggcgcctggtagcgtaacgcgctttttatcaagtcagcgtctaattaaagaagcatgcgatgaatcacgctttgataaaaacttaagtcaaggcctgaaatttgggcgtgattttctgggagacgggttatttacaagctggacgcatgaaccgaattggaaaaaagcgcataatatcttaggcccaagctttagtcagcgtgcaatgaaacgttatcatgcgatgatggtcgatatcgccgtgcagcttgttcaaaagtgggagcgtctaaatgcagatgagcatattgaagtatcggaagacatgacacgtttaacgctggatacaattggtctttgcggcttcaactatcgctttaacagcttttaccgagatcagcctcatccatttattgtggcggttgtgcgtgcactggatgaagtaatgaacaagctgcagcgagcaaatccagacgacccagcttatgatgaaaacaagcgccagtgtcaagaagatatcaaggtgatgaacgactatgtcgataaaattattgcagatcgcaaagcaaggggtgaacaaagccatgatttattaacgcagatgctaaacggaaaagatccagaaacgggtgagccgcttgatgacgggaacattcgttatcaaattattacattcttaatcgcgggacacgaaacaacaagtggtcttttatcatttgcgctgtatttcttagtgaaaaatccacatgtattacaaaaagtagcagaagaagcagcacgagttctagtagatcctgttccaagctacaaacaagtcaaacagcttaaatatgtcggcatggtcttaaacgaagcgctgcgcttatggccaactggtcctgcgttttccctatatgcaaaagaagatacggtgcttggaggagaatatcctttaaccaaaggcgacgaagtaatggttctgattcctcagcttcaccgtgataaaacaatttggggagacgatgtggaggagttccgtccagagcgttttgaaaatccaagtgcgattccgcagcatgcgtttaaaccgtttggaaacggtcagcgtgcgtgtatcggtcagcagttcgctcttcatgaagcaacgctggtacttggtatgatgctaaaacactttgactttgaagatcatacaaactacgagctcgttattaaagaaaagttaacgttaaaacctgaaggctttgtggtaaaagcaaaatcgaaaggcattccgcttggcggtattccttcacctagcactgaacagtctgctaaaaaagtacgcaaaaaggcagaaaacgctcataatacgccgctgcttgtgctatacggttcaaatgcgggaacagctgaaggaacggcgcgtgatttagcagatattgcaatgagcaaaggatttgcaccgcaggtcgcaacgcttgattcacacgccggaaatcttccgcgcgaaggagctgtattaattgtaacggcgtcttataacggtcatccgcctgataacgcaaagcaatttgtcgactggttagaccaagcgtctgctgatgaagtaaaaggcgttcgctactccgtatttggatgcggcgataaaaactgggctgcgacgtatcaaaaagtgcctgcttttatcgatgaaacgcttgccgctaaaggggcagaaaacatcgctgaccgcggtgaagcagatgcaagcgacgactttgaaggcacatatgaagaatggagtgatcatatgtggagtgacgtagcagcctactttaacctcgacattgaaaacagtgaagataataaatctactctttcacttcaatttgtcgacagcgccgcggatatgccgcttgcgaaaatgcacggtgcgttttcaacgaacgtcgtagcaagcaaagaacttcaacagccaggcagtgcacgaagcacgcgacatcttgaaattgaacttccaaaagaagcttcttatcaagaaggagatcatttaggtgttattcctcgcaactatgaaggaatagtaaaccgtgtaacagcaaggttcggcctaagcgcatcacagcaaatccgtctggaagcagaagaagaaaaattagctcatttgccactcgctaaaacagtatccgtagaagagcttctgcaatacgtggagcttcaagatcctgttacgcgcacgcagcttcgcgcaatggctgctaaaacggtctgcccgccgcataaagtagagcttgaagccttgcttgaaaagcaagcctacaaagaacaagtgctggcaaaacgtttaacaatgcttgaactgcttgaaaaatacccggcgtgtgaaatgaaattcagcgaatttatcgcccttctgccaagcatacgcccgcgctattactcgatttcttcatcacctcgtgtcgatgaaaaacaagcaagcatcacggtcagcgttgtctcaggaccggcgtggagcggatatggagaatataaaggaattgcgtcgaactatcttgccgagctgcaagaaggagatacgattacgtgctttatttccacagatcagtcagaatttacgctgccaaaagaccctgaaacgccgcttatcatggtcggaccgggaacaggcgtcgcgccgtttagaggctttgtgcaggcgcgcaaacagctaaaagaacaaggacagtcacttggagaagcacatttatacttcggctgccgttcacctcatgaagactatctgtatcaagaagagcttgaaaacgcccaaagcgaaggcatcattacgcttcataccgctttttctcgcatgccaaatcagccgaaaacatacgttcagcacgtaatggaacaagacggcaagaaattgattgaacttcttgatcaaggagcgcacttctatatttgcggagacggaagccaaatggcacctgccgttgaagcaacgcttatgaaaagctatgctgacgttcaccaagtgagtgaagcagacgctcgcttatggctgcagcagctagaagaaaaaggccgatacgcaaaagacgtgtgggctggg

SEQ ID NO: 294 - protein, 1049 aa, synthetic construct
  REGION 1..1049: note = Variant of cytochrome P450
MTIKEMPQPKTFGELKNLPLLNTDKPVQALMRIADELGEIFKFEAPGSVTRFLSSQRLIKEACDESRFDKNLSQGLKFGRDFLGDGLFTSWTHEPNWKKAHNILGPSFSQRAMKRYHAMMVDIAVQLVQKWERLNADEHIEVSEDMTRLTLDTIGLCGFNYRFNSFYRDQPHPFIVAVVRALDEVMNKLQRANPDDPAYDENKRQCQEDIKVMNDYVDKIIADRKARGEQSHDLLTQMLNGKDPETGEPLDDGNIRYQIITFLIAGHETTSGLLSFALYFLVKNPHVLQKVAEEAARVLVDPVPSYKQVKQLKYVGMVLNEALRLWPTGPAFSLYAKEDTVLGGEYPLTKGDEVMVLIPQLHRDKTIWGDDVEEFRPERFENPSAIPQHAFKPFGNGQRACIGQQFALHEATLVLGMMLKHFDFEDHTNYELVIKEKLTLKPEGFVVKAKSKGIPLGGIPSPSTEQSAKKVRKKAENAHNTPLLVLYGSNAGTAEGTARDLADIAMSKGFAPQVATLDSHAGNLPREGAVLIVTASYNGHPPDNAKQFVDWLDQASADEVKGVRYSVFGCGDKNWAATYQKVPAFIDETLAAKGAENIADRGEADASDDFEGTYEEWSDHMWSDVAAYFNLDIENSEDNKSTLSLQFVDSAADMPLAKMHGAFSTNVVASKELQQPGSARSTRHLEIELPKEASYQEGDHLGVIPRNYEGIVNRVTARFGLSASQQIRLEAEEEKLAHLPLAKTVSVEELLQYVELQDPVTRTQLRAMAAKTVCPPHKVELEALLEKQAYKEQVLAKRLTMLELLEKYPACEMKFSEFIALLPSIRPRYYSISSSPRVDEKQASITVSVVSGPAWSGYGEYKGIASNYLAELQEGDTITCFISTDQSEFTLPKDPETPLIMVGPGTGVAPFRGFVQARKQLKEQGQSLGEAHLYFGCRSPHEDYLYQEELENAQSEGIITLHTAFSRMPNQPKTYVQHVMEQDGKKLIELLDQGAHFYICGDGSQMAPAVEATLMKSYADVHQVSEADARLWLQQLEEKGRYAKDVWAG

SEQ ID NO: 295 - DNA, 3147 bp, synthetic construct
  misc_feature 1..3147: note = Variant of cytochrome P450
  source 1..3147: mol_type = other DNA
atgacaattaaggaaatgcctcagcctaagacgtttggagaacttaaaaatttaccgttattaaacacagataaaccggttcaagctttgatgcgtattgcggatgaattaggagaaatctttaaattcgaggcgcctggtagcgtaacgcgctttttatcaagtcagcgtctaattaaagaagcatgcgatgaatcacgctttgataaaaacttaagtcaagtgctgaaatttgggcgtgattttctgggagacgggttatttacaagctggacgcatgaaccgaattggaaaaaagcgcataatatcttaggcccaagctttagtcagcgtgcaatgaaacgttatcatgcgatgatggtcgatatcgccgtgcagcttgttcaaaagtgggagcgtctaaatgcagatgagcatattgaagtatcggaagacatgacacgtttaacgctggatacaattggtctttgcggcttcaactatcgctttaacagcttttaccgagatcagcctcatccatttattgtgagtgttgtgcgtgcactggatgaagtaatgaacaagctgcagcgagcaaatccagacgacccagcttatgatgaaaacaagcgccagtgtcaagaagatatcaaggtgatgaacgactatgtcgataaaattattgcagatcgcaaagcaaggggtgaacaaagccatgatttattaacgcagatgctaaacggaaaagatccagaaacgggtgagccgcttgatgacgggaacattcgttatcaaattattacattcttaatcgcgggacacgaaacaacaagtggtcttttatcatttgcgctgtatttcttagtgaaaaatccacatgtattacaaaaagtagcagaagaagcagcacgagttctagtagatcctgttccaagctacaaacaagtcaaacagcttaaatatgtcggcatggtcttaaacgaagcgctgcgcttatggccaactggtcctgcgttttccctatatgcaaaagaagatacggtgcttggaggagaatatcctttaaccaaaggcgacgaagtaatggttctgattcctcagcttcaccgtgataaaacaatttggggagacgatgtggaggagttccgtccagagcgttttgaaaatccaagtgcgattccgcagcatgcgtttaaaccgtttggaaacggtcagcgtgcgtgtatcggtcagcagttcgctcttcatgaagcaacgctggtacttggtatgatgctaaaacactttgactttgaagatcatacaaactacgagctcgttattaaagaaaagttaacgttaaaacctgaaggctttgtggtaaaagcaaaatcgaaaggcattccgcttggcggtattccttcacctagcactgaacagtctgctaaaaaagtacgcaaaaaggcagaaaacgctcataatacgccgctgcttgtgctatacggttcaaatgcgggaacagctgaaggaacggcgcgtgatttagcagatattgcaatgagcaaaggatttgcaccgcaggtcgcaacgcttgattcacacgccggaaatcttccgcgcgaaggagctgtattaattgtaacggcgtcttataacggtcatccgcctgataacgcaaagcaatttgtcgactggttagaccaagcgtctgctgatgaagtaaaaggcgttcgctactccgtatttggatgcggcgataaaaactgggctgcgacgtatcaaaaagtgcctgcttttatcgatgaaacgcttgccgctaaaggggcagaaaacatcgctgaccgcggtgaagcagatgcaagcgacgactttgaaggcacatatgaagaatggagtgatcatatgtggagtgacgtagcagcctactttaacctcgacattgaaaacagtgaagataataaatctactctttcacttcaatttgtcgacagcgccgcggatatgccgcttgcgaaaatgcacggtgcgttttcaacgaacgtcgtagcaagcaaagaacttcaacagccaggcagtgcacgaagcacgcgacatcttgaaattgaacttccaaaagaagcttcttatcaagaaggagatcatttaggtgttattcctcgcaactatgaaggaatagtaaaccgtgtaacagcaaggttcggcctaagcgcatcacagcaaatccgtctggaagcagaagaagaaaaattagctcatttgccactcgctaaaacagtatccgtagaagagcttctgcaatacgtggagcttcaagatcctgttacgcgcacgcagcttcgcgcaatggctgctaaaacggtctgcccgccgcataaagtagagcttgaagccttgcttgaaaagcaagcctacaaagaacaagtgctggcaaaacgtttaacaatgcttgaactgcttgaaaaatacccggcgtgtgaaatgaaattcagcgaatttatcgcccttctgccaagcatacgcccgcgctattactcgatttcttcatcacctcgtgtcgatgaaaaacaagcaagcatcacggtcagcgttgtctcaggaccggcgtggagcggatatggagaatataaaggaattgcgtcgaactatcttgccgagctgcaagaaggagatacgattacgtgctttatttccacagatcagtcagaatttacgctgccaaaagaccctgaaacgccgcttatcatggtcggaccgggaacaggcgtcgcgccgtttagaggctttgtgcaggcgcgcaaacagctaaaagaacaaggacagtcacttggagaagcacatttatacttcggctgccgttcacctcatgaagactatctgtatcaagaagagcttgaaaacgcccaaagcgaaggcatcattacgcttcataccgctttttctcgcatgccaaatcagccgaaaacatacgttcagcacgtaatggaacaagacggcaagaaattgattgaacttcttgatcaaggagcgcacttctatatttgcggagacggaagccaaatggcacctgccgttgaagcaacgcttatgaaaagctatgctgacgttcaccaagtgagtgaagcagacgctcgcttatggctgcagcagctagaagaaaaaggccgatacgcaaaagacgtgtgggctggg

SEQ ID NO: 296 - protein, 1049 aa, synthetic construct
  REGION 1..1049: note = Variant of cytochrome P450
MTIKEMPQPKTFGELKNLPLLNTDKPVQALMRIADELGEIFKFEAPGSVTRFLSSQRLIKEACDESRFDKNLSQVLKFGRDFLGDGLFTSWTHEPNWKKAHNILGPSFSQRAMKRYHAMMVDIAVQLVQKWERLNADEHIEVSEDMTRLTLDTIGLCGFNYRFNSFYRDQPHPFIVSVVRALDEVMNKLQRANPDDPAYDENKRQCQEDIKVMNDYVDKIIADRKARGEQSHDLLTQMLNGKDPETGEPLDDGNIRYQIITFLIAGHETTSGLLSFALYFLVKNPHVLQKVAEEAARVLVDPVPSYKQVKQLKYVGMVLNEALRLWPTGPAFSLYAKEDTVLGGEYPLTKGDEVMVLIPQLHRDKTIWGDDVEEFRPERFENPSAIPQHAFKPFGNGQRACIGQQFALHEATLVLGMMLKHFDFEDHTNYELVIKEKLTLKPEGFVVKAKSKGIPLGGIPSPSTEQSAKKVRKKAENAHNTPLLVLYGSNAGTAEGTARDLADIAMSKGFAPQVATLDSHAGNLPREGAVLIVTASYNGHPPDNAKQFVDWLDQASADEVKGVRYSVFGCGDKNWAATYQKVPAFIDETLAAKGAENIADRGEADASDDFEGTYEEWSDHMWSDVAAYFNLDIENSEDNKSTLSLQFVDSAADMPLAKMHGAFSTNVVASKELQQPGSARSTRHLEIELPKEASYQEGDHLGVIPRNYEGIVNRVTARFGLSASQQIRLEAEEEKLAHLPLAKTVSVEELLQYVELQDPVTRTQLRAMAAKTVCPPHKVELEALLEKQAYKEQVLAKRLTMLELLEKYPACEMKFSEFIALLPSIRPRYYSISSSPRVDEKQASITVSVVSGPAWSGYGEYKGIASNYLAELQEGDTITCFISTDQSEFTLPKDPETPLIMVGPGTGVAPFRGFVQARKQLKEQGQSLGEAHLYFGCRSPHEDYLYQEELENAQSEGIITLHTAFSRMPNQPKTYVQHVMEQDGKKLIELLDQGAHFYICGDGSQMAPAVEATLMKSYADVHQVSEADARLWLQQLEEKGRYAKDVWAG

SEQ ID NO: 297 - DNA, 3147 bp, synthetic construct
  misc_feature 1..3147: note = Variant of cytochrome P450
  source 1..3147: mol_type = other DNA
atgacaattaaggaaatgcctcagcctaagacgtttggagaacttaaaaatttaccgttattaaacacagataaaccggttcaagctttgatgcgtattgcggatgaattaggagaaatctttaaattcgaggcgcctggtagcgtaacgcgctttttatcaagtcagcgtctaattaaagaagcatgcgatgaatcacgctttgataaaaacttaagtcaagagctgaaatttgggcgtgattttctgggagacgggttatttacaagctggacgcatgaaccgaattggaaaaaagcgcataatatcttaggcccaagctttagtcagcgtgcaatgaaacgttatcatgcgatgatggtcgatatcgccgtgcagcttgttcaaaagtgggagcgtctaaatgcagatgagcatattgaagtatcggaagacatgacacgtttaacgctggatacaattggtctttgcggcttcaactatcgctttaacagcttttaccgagatcagcctcatccatttattgtgagtgttgtgcgtgcactggatgaagtaatgaacaagctgcagcgagcaaatccagacgacccagcttatgatgaaaacaagcgccagtgtcaagaagatatcaaggtgatgaacgactatgtcgataaaattattgcagatcgcaaagcaaggggtgaacaaagccatgatttattaacgcagatgctaaacggaaaagatccagaaacgggtgagccgcttgatgacgggaacattcgttatcaaattattacattcttaatcgcgggacacgaaacaacaagtggtcttttatcatttgcgctgtatttcttagtgaaaaatccacatgtattacaaaaagtagcagaagaagcagcacgagttctagtagatcctgttccaagctacaaacaagtcaaacagcttaaatatgtcggcatggtcttaaacgaagcgctgcgcttatggccaactggtcctgcgttttccctatatgcaaaagaagatacggtgcttggaggagaatatcctttaaccaaaggcgacgaagtaatggttctgattcctcagcttcaccgtgataaaacaatttggggagacgatgtggaggagttccgtccagagcgttttgaaaatccaagtgcgattccgcagcatgcgtttaaaccgtttggaaacggtcagcgtgcgtgtatcggtcagcagttcgctcttcatgaagcaacgctggtacttggtatgatgctaaaacactttgactttgaagatcatacaaactacgagctcgttattaaagaaaagttaacgttaaaacctgaaggctttgtggtaaaagcaaaatcgaaaggcattccgcttggcggtattccttcacctagcactgaacagtctgctaaaaaagtacgcaaaaaggcagaaaacgctcataatacgccgctgcttgtgctatacggttcaaatgcgggaacagctgaaggaacggcgcgtgatttagcagatattgcaatgagcaaaggatttgcaccgcaggtcgcaacgcttgattcacacgccggaaatcttccgcgcgaaggagctgtattaattgtaacggcgtcttataacggtcatccgcctgataacgcaaagcaatttgtcgactggttagaccaagcgtctgctgatgaagtaaaaggcgttcgctactccgtatttggatgcggcgataaaaactgggctgcgacgtatcaaaaagtgcctgcttttatcgatgaaacgcttgccgctaaaggggcagaaaacatcgctgaccgcggtgaagcagatgcaagcgacgactttgaaggcacatatgaagaatggagtgatcatatgtggagtgacgtagcagcctactttaacctcgacattgaaaacagtgaagataataaatctactctttcacttcaatttgtcgacagcgccgcggatatgccgcttgcgaaaatgcacggtgcgttttcaacgaacgtcgtagcaagcaaagaacttcaacagccaggcagtgcacgaagcacgcgacatcttgaaattgaacttccaaaagaagcttcttatcaagaaggagatcatttaggtgttattcctcgcaactatgaaggaatagtaaaccgtgtaacagcaaggttcggcctaagcgcatcacagcaaatccgtctggaagcagaagaagaaaaattagctcatttgccactcgctaaaacagtatccgtagaagagcttctgcaatacgtggagcttcaagatcctgttacgcgcacgcagcttcgcgcaatggctgctaaaacggtctgcccgccgcataaagtagagcttgaagccttgcttgaaaagcaagcctacaaagaacaagtgctggcaaaacgtttaacaatgcttgaactgcttgaaaaatacccggcgtgtgaaatgaaattcagcgaatttatcgcccttctgccaagcatacgcccgcgctattactcgatttcttcatcacctcgtgtcgatgaaaaacaagcaagcatcacggtcagcgttgtctcaggaccggcgtggagcggatatggagaatataaaggaattgcgtcgaactatcttgccgagctgcaagaaggagatacgattacgtgctttatttccacagatcagtcagaatttacgctgccaaaagaccctgaaacgccgcttatcatggtcggaccgggaacaggcgtcgcgccgtttagaggctttgtgcaggcgcgcaaacagctaaaagaacaaggacagtcacttggagaagcacatttatacttcggctgccgttcacctcatgaagactatctgtatcaagaagagcttgaaaacgcccaaagcgaaggcatcattacgcttcataccgctttttctcgcatgccaaatcagccgaaaacatacgttcagcacgtaatggaacaagacggcaagaaattgattgaacttcttgatcaaggagcgcacttctatatttgcggagacggaagccaaatggcacctgccgttgaagcaacgcttatgaaaagctatgctgacgttcaccaagtgagtgaagcagacgctcgcttatggctgcagcagctagaagaaaaaggccgatacgcaaaagacgtgtgggctggg

SEQ ID NO: 298 - protein, 1049 aa, synthetic construct
  REGION 1..1049: note = Variant of cytochrome P450
MTIKEMPQPKTFGELKNLPLLNTDKPVQALMRIADELGEIFKFEAPGSVTRFLSSQRLIKEACDESRFDKNLSQELKFGRDFLGDGLFTSWTHEPNWKKAHNILGPSFSQRAMKRYHAMMVDIAVQLVQKWERLNADEHIEVSEDMTRLTLDTIGLCGFNYRFNSFYRDQPHPFIVSVVRALDEVMNKLQRANPDDPAYDENKRQCQEDIKVMNDYVDKIIADRKARGEQSHDLLTQMLNGKDPETGEPLDDGNIRYQIITFLIAGHETTSGLLSFALYFLVKNPHVLQKVAEEAARVLVDPVPSYKQVKQLKYVGMVLNEALRLWPTGPAFSLYAKEDTVLGGEYPLTKGDEVMVLIPQLHRDKTIWGDDVEEFRPERFENPSAIPQHAFKPFGNGQRACIGQQFALHEATLVLGMMLKHFDFEDHTNYELVIKEKLTLKPEGFVVKAKSKGIPLGGIPSPSTEQSAKKVRKKAENAHNTPLLVLYGSNAGTAEGTARDLADIAMSKGFAPQVATLDSHAGNLPREGAVLIVTASYNGHPPDNAKQFVDWLDQASADEVKGVRYSVFGCGDKNWAATYQKVPAFIDETLAAKGAENIADRGEADASDDFEGTYEEWSDHMWSDVAAYFNLDIENSEDNKSTLSLQFVDSAADMPLAKMHGAFSTNVVASKELQQPGSARSTRHLEIELPKEASYQEGDHLGVIPRNYEGIVNRVTARFGLSASQQIRLEAEEEKLAHLPLAKTVSVEELLQYVELQDPVTRTQLRAMAAKTVCPPHKVELEALLEKQAYKEQVLAKRLTMLELLEKYPACEMKFSEFIALLPSIRPRYYSISSSPRVDEKQASITVSVVSGPAWSGYGEYKGIASNYLAELQEGDTITCFISTDQSEFTLPKDPETPLIMVGPGTGVAPFRGFVQARKQLKEQGQSLGEAHLYFGCRSPHEDYLYQEELENAQSEGIITLHTAFSRMPNQPKTYVQHVMEQDGKKLIELLDQGAHFYICGDGSQMAPAVEATLMKSYADVHQVSEADARLWLQQLEEKGRYAKDVWAG

SEQ ID NO: 299 - DNA, 3147 bp, synthetic construct
  misc_feature 1..3147: note = Variant of cytochrome P450
  source 1..3147: mol_type = other DNA
atgacaattaaggaaatgcctcagcctaagacgtttggagaacttaaaaatttaccgttattaaacacagataaaccggttcaagctttgatgcgtattgcggatgaattaggagaaatctttaaattcgaggcgcctggtagcgtaacgcgctttttatcaagtcagcgtctaattaaagaagcatgcgatgaatcacgctttgataaaaacttaagtcaaggcctgaaatttgggcgtgattttctgggagacgggttatttacaagctggacgcatgaaccgaattggaaaaaagcgcataatatcttaggcccaagctttagtcagcgtgcaatgaaacgttatcatgcgatgatggtcgatatcgccgtgcagcttgttcaaaagtgggagcgtctaaatgcagatgagcatattgaagtatcggaagacatgacacgtttaacgctggatacaattggtctttgcggcttcaactatcgctttaacagcttttaccgagatcagcctcatccatttattgtgagtgcggtgcgtgcactggatgaagtaatgaacaagctgcagcgagcaaatccagacgacccagcttatgatgaaaacaagcgccagtgtcaagaagatatcaaggtgatgaacgactatgtcgataaaattattgcagatcgcaaagcaaggggtgaacaaagccatgatttattaacgcagatgctaaacggaaaagatccagaaacgggtgagccgcttgatgacgggaacattcgttatcaaattattacattcttaatcgcgggacacgaaacaacaagtggtcttttatcatttgcgctgtatttcttagtgaaaaatccacatgtattacaaaaagtagcagaagaagcagcacgagttctagtagatcctgttccaagctacaaacaagtcaaacagcttaaatatgtcggcatggtcttaaacgaagcgctgcgcttatggccaactggtcctgcgttttccctatatgcaaaagaagatacggtgcttggaggagaatatcctttaaccaaaggcgacgaagtaatggttctgattcctcagcttcaccgtgataaaacaatttggggagacgatgtggaggagttccgtccagagcgttttgaaaatccaagtgcgattccgcagcatgcgtttaaaccgtttggaaacggtcagcgtgcgtgtatcggtcagcagttcgctcttcatgaagcaacgctggtacttggtatgatgctaaaacactttgactttgaagatcatacaaactacgagctcgttattaaagaaaagttaacgttaaaacctgaaggctttgtggtaaaagcaaaatcgaaaggcattccgcttggcggtattccttcacctagcactgaacagtctgctaaaaaagtacgcaaaaaggcagaaaacgctcataatacgccgctgcttgtgctatacggttcaaatgcgggaacagctgaaggaacggcgcgtgatttagcagatattgcaatgagcaaaggatttgcaccgcaggtcgcaacgcttgattcacacgccggaaatcttccgcgcgaaggagctgtattaattgtaacggcgtcttataacggtcatccgcctgataacgcaaagcaatttgtcgactggttagaccaagcgtctgctgatgaagtaaaaggcgttcgctactccgtatttggatgcggcgataaaaactgggctgcgacgtatcaaaaagtgcctgcttttatcgatgaaacgcttgccgctaaaggggcagaaaacatcgctgaccgcggtgaagcagatgcaagcgacgactttgaaggcacatatgaagaatggagtgatcatatgtggagtgacgtagcagcctactttaacctcgacattgaaaacagtgaagataataaatctactctttcacttcaatttgtcgacagcgccgcggatatgccgcttgcgaaaatgcacggtgcgttttcaacgaacgtcgtagcaagcaaagaacttcaacagccaggcagtgcacgaagcacgcgacatcttgaaattgaacttccaaaagaagcttcttatcaagaaggagatcatttaggtgttattcctcgcaactatgaaggaatagtaaaccgtgtaacagcaaggttcggcctaagcgcatcacagcaaatccgtctggaagcagaagaagaaaaattagctcatttgccactcgctaaaacagtatccgtagaagagcttctgcaatacgtggagcttcaagatcctgttacgcgcacgcagcttcgcgcaatggctgctaaaacggtctgcccgccgcataaagtagagcttgaagccttgcttgaaaagcaagcctacaaagaacaagtgctggcaaaacgtttaacaatgcttgaactgcttgaaaaatacccggcgtgtgaaatgaaattcagcgaatttatcgcccttctgccaagcatacgcccgcgctattactcgatttcttcatcacctcgtgtcgatgaaaaacaagcaagcatcacggtcagcgttgtctcaggaccggcgtggagcggatatggagaatataaaggaattgcgtcgaactatcttgccgagctgcaagaaggagatacgattacgtgctttatttccacagatcagtcagaatttacgctgccaaaagaccctgaaacgccgcttatcatggtcggaccgggaacaggcgtcgcgccgtttagaggctttgtgcaggcgcgcaaacagctaaaagaacaaggacagtcacttggagaagcacatttatacttcggctgccgttcacctcatgaagactatctgtatcaagaagagcttgaaaacgcccaaagcgaaggcatcattacgcttcataccgctttttctcgcatgccaaatcagccgaaaacatacgttcagcacgtaatggaacaagacggcaagaaattgattgaacttcttgatcaaggagcgcacttctatatttgcggagacggaagccaaatggcacctgccgttgaagcaacgcttatgaaaagctatgctgacgttcaccaagtgagtgaagcagacgctcgcttatggctgcagcagctagaagaaaaaggccgatacgcaaaagacgtgtgggctggg

SEQ ID NO: 300 - protein, 1049 aa, synthetic construct
  REGION 1..1049: note = Variant of cytochrome P450
MTIKEMPQPKTFGELKNLPLLNTDKPVQALMRIADELGEIFKFEAPGSVTRFLSSQRLIKEACDESRFDKNLSQGLKFGRDFLGDGLFTSWTHEPNWKKAHNILGPSFSQRAMKRYHAMMVDIAVQLVQKWERLNADEHIEVSEDMTRLTLDTIGLCGFNYRFNSFYRDQPHPFIVSAVRALDEVMNKLQRANPDDPAYDENKRQCQEDIKVMNDYVDKIIADRKARGEQSHDLLTQMLNGKDPETGEPLDDGNIRYQIITFLIAGHETTSGLLSFALYFLVKNPHVLQKVAEEAARVLVDPVPSYKQVKQLKYVGMVLNEALRLWPTGPAFSLYAKEDTVLGGEYPLTKGDEVMVLIPQLHRDKTIWGDDVEEFRPERFENPSAIPQHAFKPFGNGQRACIGQQFALHEATLVLGMMLKHFDFEDHTNYELVIKEKLTLKPEGFVVKAKSKGIPLGGIPSPSTEQSAKKVRKKAENAHNTPLLVLYGSNAGTAEGTARDLADIAMSKGFAPQVATLDSHAGNLPREGAVLIVTASYNGHPPDNAKQFVDWLDQASADEVKGVRYSVFGCGDKNWAATYQKVPAFIDETLAAKGAENIADRGEADASDDFEGTYEEWSDHMWSDVAAYFNLDIENSEDNKSTLSLQFVDSAADMPLAKMHGAFSTNVVASKELQQPGSARSTRHLEIELPKEASYQEGDHLGVIPRNYEGIVNRVTARFGLSASQQIRLEAEEEKLAHLPLAKTVSVEELLQYVELQDPVTRTQLRAMAAKTVCPPHKVELEALLEKQAYKEQVLAKRLTMLELLEKYPACEMKFSEFIALLPSIRPRYYSISSSPRVDEKQASITVSVVSGPAWSGYGEYKGIASNYLAELQEGDTITCFISTDQSEFTLPKDPETPLIMVGPGTGVAPFRGFVQARKQLKEQGQSLGEAHLYFGCRSPHEDYLYQEELENAQSEGIITLHTAFSRMPNQPKTYVQHVMEQDGKKLIELLDQGAHFYICGDGSQMAPAVEATLMKSYADVHQVSEADARLWLQQLEEKGRYAKDVWAG

SEQ ID NO: 301 - DNA, 3147 bp, synthetic construct
  misc_feature 1..3147: note = Variant of cytochrome P450
  source 1..3147: mol_type = other DNA
atgacaattaaggaaatgcctcagcctaagacgtttggagaacttaaaaatttaccgttattaaacacagataaaccggttcaagctttgatgcgtattgcggatgaattaggagaaatctttaaattcgaggcgcctggtagcgtaacgcgctttttatcaagtcagcgtctaattaaagaagcatgcgatgaatcacgctttgataaaaacttaagtcaaggcctgaaatttgggcgtgattttctgggagacgggttatttacaagctggacgcatgaaccgaattggaaaaaagcgcataatatcttaggcccaagctttagtcagcgtgcaatgaaacgttatcatgcgatgatggtcgatatcgccgtgcagcttgttcaaaagtgggagcgtctaaatgcagatgagcatattgaagtatcggaagacatgacacgtttaacgctggatacaattggtctttgcggcttcaactatcgctttaacagcttttaccgagatcagcctcatccatttattgtgagtgttgtgcgtgcactggatgaagtaatgaacaagctgcagcgagcaaatccagacgacccagcttatgatgaaaacaagcgccagtgtcaagaagatatcaaggtgatgaacgactatgtcgataaaattattgcagatcgcaaagcaaggggtgaacaaagccatgatttattaacgcagatgctaaacggaaaagatccagaaacgggtgagccgcttgatgacgggaacattcgttatcaaattattacattcttaatcgcgggacacgaaacaacaagtggtcttttatcatttgcgctgtatttcttagtgaaaaatccacatgtattacaaaaagtagcagaagaagcagcacgagttctagtagatcctgttccaagctacaaacaagtcaaacagcttaaatatgtcggcatggtcttaaacgaagcgctgcgcttatggccaactggtcctgcgttttccctatatgcaaaagaagatacggtgcttggaggagaatatcctttaaccaaaggcgacgaagtaatggttctgattcctcagcttcaccgtgataaaacaatttggggagacgatgtggaggagttccgtccagagcgttttgaaaatccaagtgcgattccgcagcatgcgtttaaaccgtttggaaacggtcagcgtgcgtgtatcggtcagcagttcgctcttcatgaagcaacgctggtacttggtatgatgctaaaacactttgactttgaagatcatacaaactacgagctcgttattaaagaaaggttaacgttaaaacctgaaggctttgtggtaaaagcaaaatcgaaaggcattccgcttggcggtattccttcacctagcactgaacagtctgctaaaaaagtacgcaaaaaggcagaaaacgctcataatacgccgctgcttgtgctatacggttcaaatgcgggaacagctgaaggaacggcgcgtgatttagcagatattgcaatgagcaaaggatttgcaccgcaggtcgcaacgcttgattcacacgccggaaatcttccgcgcgaaggagctgtattaattgtaacggcgtcttataacggtcatccgcctgataacgcaaagcaatttgtcgactggttagaccaagcgtctgctgatgaagtaaaaggcgttcgctactccgtatttggatgcggcgataaaaactgggctgcgacgtatcaaaaagtgcctgcttttatcgatgaaacgcttgccgctaaaggggcagaaaacatcgctgaccgcggtgaagcagatgcaagcgacgactttgaaggcacatatgaagaatggagtgatcatatgtggagtgacgtagcagcctactttaacctcgacattgaaaacagtgaagataataaatctactctttcacttcaatttgtcgacagcgccgcggatatgccgcttgcgaaaatgcacggtgcgttttcaacgaacgtcgtagcaagcaaagaacttcaacagccaggcagtgcacgaagcacgcgacatcttgaaattgaacttccaaaagaagcttcttatcaagaaggagatcatttaggtgttattcctcgcaactatgaaggaatagtaaaccgtgtaacagcaaggttcggcctaagcgcatcacagcaaatccgtctggaagcagaagaagaaaaattagctcatttgccactcgctaaaacagtatccgtagaagagcttctgcaatacgtggagcttcaagatcctgttacgcgcacgcagcttcgcgcaatggctgctaaaacggtctgcccgccgcataaagtagagcttgaagccttgcttgaaaagcaagcctacaaagaacaagtgctggcaaaacgtttaacaatgcttgaactgcttgaaaaatacccggcgtgtgaaatgaaattcagcgaatttatcgcccttctgccaagcatacgcccgcgctattactcgatttcttcatcacctcgtgtcgatgaaaaacaagcaagcatcacggtcagcgttgtctcaggaccggcgtggagcggatatggagaatataaaggaattgcgtcgaactatcttgccgagctgcaagaaggagatacgattacgtgctttatttccacagatcagtcagaatttacgctgccaaaagaccctgaaacgccgcttatcatggtcggaccgggaacaggcgtcgcgccgtttagaggctttgtgcaggcgcgcaaacagctaaaagaacaaggacagtcacttggagaagcacatttatacttcggctgccgttcacctcatgaagactatctgtatcaagaagagcttgaaaacgcccaaagcgaaggcatcattacgcttcataccgctttttctcgcatgccaaatcagccgaaaacatacgttcagcacgtaatggaacaagacggcaagaaattgattgaacttcttgatcaaggagcgcacttctatatttgcggagacggaagccaaatggcacctgccgttgaagcaacgcttatgaaaagctatgctgacgttcaccaagtgagtgaagcagacgctcgcttatggctgcagcagctagaagaaaaaggccgatacgcaaaagacgtgtgggctggg

SEQ ID NO: 302 - protein, 1049 aa, synthetic construct
  REGION 1..1049: note = Variant of cytochrome P450
MTIKEMPQPKTFGELKNLPLLNTDKPVQALMRIADELGEIFKFEAPGSVTRFLSSQRLIKEACDESRFDKNLSQGLKFGRDFLGDGLFTSWTHEPNWKKAHNILGPSFSQRAMKRYHAMMVDIAVQLVQKWERLNADEHIEVSEDMTRLTLDTIGLCGFNYRFNSFYRDQPHPFIVSVVRALDEVMNKLQRANPDDPAYDENKRQCQEDIKVMNDYVDKIIADRKARGEQSHDLLTQMLNGKDPETGEPLDDGNIRYQIITFLIAGHETTSGLLSFALYFLVKNPHVLQKVAEEAARVLVDPVPSYKQVKQLKYVGMVLNEALRLWPTGPAFSLYAKEDTVLGGEYPLTKGDEVMVLIPQLHRDKTIWGDDVEEFRPERFENPSAIPQHAFKPFGNGQRACIGQQFALHEATLVLGMMLKHFDFEDHTNYELVIKERLTLKPEGFVVKAKSKGIPLGGIPSPSTEQSAKKVRKKAENAHNTPLLVLYGSNAGTAEGTARDLADIAMSKGFAPQVATLDSHAGNLPREGAVLIVTASYNGHPPDNAKQFVDWLDQASADEVKGVRYSVFGCGDKNWAATYQKVPAFIDETLAAKGAENIADRGEADASDDFEGTYEEWSDHMWSDVAAYFNLDIENSEDNKSTLSLQFVDSAADMPLAKMHGAFSTNVVASKELQQPGSARSTRHLEIELPKEASYQEGDHLGVIPRNYEGIVNRVTARFGLSASQQIRLEAEEEKLAHLPLAKTVSVEELLQYVELQDPVTRTQLRAMAAKTVCPPHKVELEALLEKQAYKEQVLAKRLTMLELLEKYPACEMKFSEFIALLPSIRPRYYSISSSPRVDEKQASITVSVVSGPAWSGYGEYKGIASNYLAELQEGDTITCFISTDQSEFTLPKDPETPLIMVGPGTGVAPFRGFVQARKQLKEQGQSLGEAHLYFGCRSPHEDYLYQEELENAQSEGIITLHTAFSRMPNQPKTYVQHVMEQDGKKLIELLDQGAHFYICGDGSQMAPAVEATLMKSYADVHQVSEADARLWLQQLEEKGRYAKDVWAG

SEQ ID NO: 303 - DNA, 3147 bp, synthetic construct
  misc_feature 1..3147: note = Variant of cytochrome P450
  source 1..3147: mol_type = other DNA
atgacaattaaggaaatgcctcagcctaagacgtttggagaacttaaaaatttaccgttattaaacacagataaaccggttcaagctttgatgcgtattgcggatgaattaggagaaatctttaaattcgaggcgcctggtagcgtaacgcgctttttatcaagtcagcgtctaattaaagaagcatgcgatgaatcacgctttgataaaaacttaagtcaaggcctgaaatttgggcgtgagtttctgggagacgggttatttacaagctggacgcatgaaccgaattggaaaaaagcgcataatatcttaggcccaagctttagtcagcgtgcaatgaaacgttatcatgcgatgatggtcgatatcgccgtgcagcttgttcaaaagtgggagcgtctaaatgcagatgagcatattgaagtatcggaagacatgacacgtttaacgctggatacaattggtctttgcggcttcaactatcgctttaacagcttttaccgagatcagcctcatccatttattgtgagtgttgtgcgtgcactggatgaagtaatgaacaagctgcagcgagcaaatccagacgacccagcttatgatgaaaacaagcgccagtgtcaagaagatatcaaggtgatgaacgactatgtcgataaaattattgcagatcgcaaagcaaggggtgaacaaagccatgatttattaacgcagatgctaaacggaaaagatccagaaacgggtgagccgcttgatgacgggaacattcgttatcaaattattacattcttaatcgcgggacacgaaacaacaagtggtcttttatcatttgcgctgtatttcttagtgaaaaatccacatgtattacaaaaagtagcagaagaagcagcacgagttctagtagatcctgttccaagctacaaacaagtcaaacagcttaaatatgtcggcatggtcttaaacgaagcgctgcgcttatggccaactggtcctgcgttttccctatatgcaaaagaagatacggtgcttggaggagaatatcctttaaccaaaggcgacgaagtaatggttctgattcctcagcttcaccgtgataaaacaatttggggagacgatgtggaggagttccgtccagagcgttttgaaaatccaagtgcgattccgcagcatgcgtttaaaccgtttggaaacggtcagcgtgcgtgtatcggtcagcagttcgctcttcatgaagcaacgctggtacttggtatgatgctaaaacactttgactttgaagatcatacaaactacgagctcgttattaaagaaaagttaacgttaaaacctgaaggctttgtggtaaaagcaaaatcgaaaggcattccgcttggcggtattccttcacctagcactgaacagtctgctaaaaaagtacgcaaaaaggcagaaaacgctcataatacgccgctgcttgtgctatacggttcaaatgcgggaacagctgaaggaacggcgcgtgatttagcagatattgcaatgagcaaaggatttgcaccgcaggtcgcaacgcttgattcacacgccggaaatcttccgcgcgaaggagctgtattaattgtaacggcgtcttataacggtcatccgcctgataacgcaaagcaatttgtcgactggttagaccaagcgtctgctgatgaagtaaaaggcgttcgctactccgtatttggatgcggcgataaaaactgggctgcgacgtatcaaaaagtgcctgcttttatcgatgaaacgcttgccgctaaaggggcagaaaacatcgctgaccgcggtgaagcagatgcaagcgacgactttgaaggcacatatgaagaatggagtgatcatatgtggagtgacgtagcagcctactttaacctcgacattgaaaacagtgaagataataaatctactctttcacttcaatttgtcgacagcgccgcggatatgccgcttgcgaaaatgcacggtgcgttttcaacgaacgtcgtagcaagcaaagaacttcaacagccaggcagtgcacgaagcacgcgacatcttgaaattgaacttccaaaagaagcttcttatcaagaaggagatcatttaggtgttattcctcgcaactatgaaggaatagtaaaccgtgtaacagcaaggttcggcctaagcgcatcacagcaaatccgtctggaagcagaagaagaaaaattagctcatttgccactcgctaaaacagtatccgtagaagagcttctgcaatacgtggagcttcaagatcctgttacgcgcacgcagcttcgcgcaatggctgctaaaacggtctgcccgccgcataaagtagagcttgaagccttgcttgaaaagcaagcctacaaagaacaagtgctggcaaaacgtttaacaatgcttgaactgcttgaaaaatacccggcgtgtgaaatgaaattcagcgaatttatcgcccttctgccaagcatacgcccgcgctattactcgatttcttcatcacctcgtgtcgatgaaaaacaagcaagcatcacggtcagcgttgtctcaggaccggcgtggagcggatatggagaatataaaggaattgcgtcgaactatcttgccgagctgcaagaaggagatacgattacgtgctttatttccacagatcagtcagaatttacgctgccaaaagaccctgaaacgccgcttatcatggtcggaccgggaacaggcgtcgcgccgtttagaggctttgtgcaggcgcgcaaacagctaaaagaacaaggacagtcacttggagaagcacatttatacttcggctgccgttcacctcatgaagactatctgtatcaagaagagcttgaaaacgcccaaagcgaaggcatcattacgcttcataccgctttttctcgcatgccaaatcagccgaaaacatacgttcagcacgtaatggaacaagacggcaagaaattgattgaacttcttgatcaaggagcgcacttctatatttgcggagacggaagccaaatggcacctgccgttgaagcaacgcttatgaaaagctatgctgacgttcaccaagtgagtgaagcagacgctcgcttatggctgcagcagctagaagaaaaaggccgatacgcaaaagacgtgtgggctggg

SEQ ID NO: 304 - protein, 1049 aa, synthetic construct
  REGION 1..1049: note = Variant of cytochrome P450
MTIKEMPQPKTFGELKNLPLLNTDKPVQALMRIADELGEIFKFEAPGSVTRFLSSQRLIKEACDESRFDKNLSQGLKFGREFLGDGLFTSWTHEPNWKKAHNILGPSFSQRAMKRYHAMMVDIAVQLVQKWERLNADEHIEVSEDMTRLTLDTIGLCGFNYRFNSFYRDQPHPFIVSVVRALDEVMNKLQRANPDDPAYDENKRQCQEDIKVMNDYVDKIIADRKARGEQSHDLLTQMLNGKDPETGEPLDDGNIRYQIITFLIAGHETTSGLLSFALYFLVKNPHVLQKVAEEAARVLVDPVPSYKQVKQLKYVGMVLNEALRLWPTGPAFSLYAKEDTVLGGEYPLTKGDEVMVLIPQLHRDKTIWGDDVEEFRPERFENPSAIPQHAFKPFGNGQRACIGQQFALHEATLVLGMMLKHFDFEDHTNYELVIKEKLTLKPEGFVVKAKSKGIPLGGIPSPSTEQSAKKVRKKAENAHNTPLLVLYGSNAGTAEGTARDLADIAMSKGFAPQVATLDSHAGNLPREGAVLIVTASYNGHPPDNAKQFVDWLDQASADEVKGVRYSVFGCGDKNWAATYQKVPAFIDETLAAKGAENIADRGEADASDDFEGTYEEWSDHMWSDVAAYFNLDIENSEDNKSTLSLQFVDSAADMPLAKMHGAFSTNVVASKELQQPGSARSTRHLEIELPKEASYQEGDHLGVIPRNYEGIVNRVTARFGLSASQQIRLEAEEEKLAHLPLAKTVSVEELLQYVELQDPVTRTQLRAMAAKTVCPPHKVELEALLEKQAYKEQVLAKRLTMLELLEKYPACEMKFSEFIALLPSIRPRYYSISSSPRVDEKQASITVSVVSGPAWSGYGEYKGIASNYLAELQEGDTITCFISTDQSEFTLPKDPETPLIMVGPGTGVAPFRGFVQARKQLKEQGQSLGEAHLYFGCRSPHEDYLYQEELENAQSEGIITLHTAFSRMPNQPKTYVQHVMEQDGKKLIELLDQGAHFYICGDGSQMAPAVEATLMKSYADVHQVSEADARLWLQQLEEKGRYAKDVWAG

SEQ ID NO: 305 - DNA, 3147 bp, synthetic construct
  misc_feature 1..3147: note = Variant of cytochrome P450
  source 1..3147: mol_type = other DNA
atgacaattaaggaaatgcctcagcctaagacgtttggagaacttaaaaatttaccgttattaaacacagataaaccggttcaagctttgatgcgtattgcggatgaattaggagaaatctttaaattcgaggcgcctggtagcgtaacgcgctttttatcaagtcagcgtctaattaaagaagcatgcgatgaatcacgctttgataaaaacttaagtcaaggcctgaaatttgggcgtgattttctgggagacgggttatttacaagctggacgcatgaaccgaattggaaaaaagcgcataatatcttaggcccaagctttagtcagcgtgcaatgaaacgttatcatgcgatgatggtcgatatcgccgtgcagcttgttcaaaagtgggagcgtctaaatgcagatgagcatattgaagtatcggaagacatgacacgtttaacgctggatacaattggtctttgcggcttcaactatcgctttaacagcttttaccgagatcagcctcatccatttattgtgagtgttgtgcgtgcactggatgaaattatgaacaagctgcagcgagcaaatccagacgacccagcttatgatgaaaacaagcgccagtgtcaagaagatatcaaggtgatgaacgactatgtcgataaaattattgcagatcgcaaagcaaggggtgaacaaagccatgatttattaacgcagatgctaaacggaaaagatccagaaacgggtgagccgcttgatgacgggaacattcgttatcaaattattacattcttaatcgcgggacacgaaacaacaagtggtcttttatcatttgcgctgtatttcttagtgaaaaatccacatgtattacaaaaagtagcagaagaagcagcacgagttctagtagatcctgttccaagctacaaacaagtcaaacagcttaaatatgtcggcatggtcttaaacgaagcgctgcgcttatggccaactggtcctgcgttttccctatatgcaaaagaagatacggtgcttggaggagaatatcctttaaccaaaggcgacgaagtaatggttctgattcctcagcttcaccgtgataaaacaatttggggagacgatgtggaggagttccgtccagagcgttttgaaaatccaagtgcgattccgcagcatgcgtttaaaccgtttggaaacggtcagcgtgcgtgtatcggtcagcagttcgctcttcatgaagcaacgctggtacttggtatgatgctaaaacactttgactttgaagatcatacaaactacgagctcgttattaaagaaaagttaacgttaaaacctgaaggctttgtggtaaaagcaaaatcgaaaggcattccgcttggcggtattccttcacctagcactgaacagtctgctaaaaaagtacgcaaaaaggcagaaaacgctcataatacgccgctgcttgtgctatacggttcaaatgcgggaacagctgaaggaacggcgcgtgatttagcagatattgcaatgagcaaaggatttgcaccgcaggtcgcaacgcttgattcacacgccggaaatcttccgcgcgaaggagctgtattaattgtaacggcgtcttataacggtcatccgcctgataacgcaaagcaatttgtcgactggttagaccaagcgtctgctgatgaagtaaaaggcgttcgctactccgtatttggatgcggcgataaaaactgggctgcgacgtatcaaaaagtgcctgcttttatcgatgaaacgcttgccgctaaaggggcagaaaacatcgctgaccgcggtgaagcagatgcaagcgacgactttgaaggcacatatgaagaatggagtgatcatatgtggagtgacgtagcagcctactttaacctcgacattgaaaacagtgaagataataaatctactctttcacttcaatttgtcgacagcgccgcggatatgccgcttgcgaaaatgcacggtgcgttttcaacgaacgtcgtagcaagcaaagaacttcaacagccaggcagtgcacgaagcacgcgacatcttgaaattgaacttccaaaagaagcttcttatcaagaaggagatcatttaggtgttattcctcgcaactatgaaggaatagtaaaccgtgtaacagcaaggttcggcctaagcgcatcacagcaaatccgtctggaagcagaagaagaaaaattagctcatttgccactcgctaaaacagtatccgtagaagagcttctgcaatacgtggagcttcaagatcctgttacgcgcacgcagcttcgcgcaatggctgctaaaacggtctgcccgccgcataaagtagagcttgaagccttgcttgaaaagcaagcctacaaagaacaagtgctggcaaaacgtttaacaatgcttgaactgcttgaaaaatacccggcgtgtgaaatgaaattcagcgaatttatcgcccttctgccaagcatacgcccgcgctattactcgatttcttcatcacctcgtgtcgatgaaaaacaagcaagcatcacggtcagcgttgtctcaggaccggcgtggagcggatatggagaatataaaggaattgcgtcgaactatcttgccgagctgcaagaaggagatacgattacgtgctttatttccacagatcagtcagaatttacgctgccaaaagaccctgaaacgccgcttatcatggtcggaccgggaacaggcgtcgcgccgtttagaggctttgtgcaggcgcgcaaacagctaaaagaacaaggacagtcacttggagaagcacatttatacttcggctgccgttcacctcatgaagactatctgtatcaagaagagcttgaaaacgcccaaagcgaaggcatcattacgcttcataccgctttttctcgcatgccaaatcagccgaaaacatacgttcagcacgtaatggaacaagacggcaagaaattgattgaacttcttgatcaaggagcgcacttctatatttgcggagacggaagccaaatggcacctgccgttgaagcaacgcttatgaaaagctatgctgacgttcaccaagtgagtgaagcagacgctcgcttatggctgcagcagctagaagaaaaaggccgatacgcaaaagacgtgtgggctggg

SEQ ID NO: 306 - protein, 1049 aa, synthetic construct
  REGION 1..1049: note = Variant of cytochrome P450
MTIKEMPQPKTFGELKNLPLLNTDKPVQALMRIADELGEIFKFEAPGSVTRFLSSQRLIKEACDESRFDKNLSQGLKFGRDFLGDGLFTSWTHEPNWKKAHNILGPSFSQRAMKRYHAMMVDIAVQLVQKWERLNADEHIEVSEDMTRLTLDTIGLCGFNYRFNSFYRDQPHPFIVSVVRALDEIMNKLQRANPDDPAYDENKRQCQEDIKVMNDYVDKIIADRKARGEQSHDLLTQMLNGKDPETGEPLDDGNIRYQIITFLIAGHETTSGLLSFALYFLVKNPHVLQKVAEEAARVLVDPVPSYKQVKQLKYVGMVLNEALRLWPTGPAFSLYAKEDTVLGGEYPLTKGDEVMVLIPQLHRDKTIWGDDVEEFRPERFENPSAIPQHAFKPFGNGQRACIGQQFALHEATLVLGMMLKHFDFEDHTNYELVIKEKLTLKPEGFVVKAKSKGIPLGGIPSPSTEQSAKKVRKKAENAHNTPLLVLYGSNAGTAEGTARDLADIAMSKGFAPQVATLDSHAGNLPREGAVLIVTASYNGHPPDNAKQFVDWLDQASADEVKGVRYSVFGCGDKNWAATYQKVPAFIDETLAAKGAENIADRGEADASDDFEGTYEEWSDHMWSDVAAYFNLDIENSEDNKSTLSLQFVDSAADMPLAKMHGAFSTNVVASKELQQPGSARSTRHLEIELPKEASYQEGDHLGVIPRNYEGIVNRVTARFGLSASQQIRLEAEEEKLAHLPLAKTVSVEELLQYVELQDPVTRTQLRAMAAKTVCPPHKVELEALLEKQAYKEQVLAKRLTMLELLEKYPACEMKFSEFIALLPSIRPRYYSISSSPRVDEKQASITVSVVSGPAWSGYGEYKGIASNYLAELQEGDTITCFISTDQSEFTLPKDPETPLIMVGPGTGVAPFRGFVQARKQLKEQGQSLGEAHLYFGCRSPHEDYLYQEELENAQSEGIITLHTAFSRMPNQPKTYVQHVMEQDGKKLIELLDQGAHFYICGDGSQMAPAVEATLMKSYADVHQVSEADARLWLQQLEEKGRYAKDVWAG

SEQ ID NO: 307 - DNA, 3147 bp, synthetic construct
  misc_feature 1..3147: note = Variant of cytochrome P450
  source 1..3147: mol_type = other DNA
atgacaattaaggaaatgcctcagcctaagacgtttggagaacttaaaaatttaccgttattaaacacagataaaccggttcaagctttgatgcgtattgcggatgaattaggagaaatctttaaattcgaggcgcctggtagcgtaacgcgctttttatcaagtcagcgtctaattaaagaagcatgcgatgaatcacgctttgataaaaacttaagtcaatgtctgaaatttgggcgtgattttctgggagacgggttatttacaagctggacgcatgaaccgaattggaaaaaagcgcataatatcttaggcccaagctttagtcagcgtgcaatgaaacgttatcatgcgatgatggtcgatatcgccgtgcagcttgttcaaaagtgggagcgtctaaatgcagatgagcatattgaagtatcggaagacatgacacgtttaacgctggatacaattggtctttgcggcttcaactatcgctttaacagcttttaccgagatcagcctcatccatttattgtgagtgttgtgcgtgcactggatgaagtaatgaacaagctgcagcgagcaaatccagacgacccagcttatgatgaaaacaagcgccagtgtcaagaagatatcaaggtgatgaacgactatgtcgataaaattattgcagatcgcaaagcaaggggtgaacaaagccatgatttattaacgcagatgctaaacggaaaagatccagaaacgggtgagccgcttgatgacgggaacattcgttatcaaattattacattcttaatcgcgggacacgaaacaacaagtggtcttttatcatttgcgctgtatttcttagtgaaaaatccacatgtattacaaaaagtagcagaagaagcagcacgagttctagtagatcctgttccaagctacaaacaagtcaaacagcttaaatatgtcggcatggtcttaaacgaagcgctgcgcttatggccaactggtcctgcgttttccctatatgcaaaagaagatacggtgcttggaggagaatatcctttaaccaaaggcgacgaagtaatggttctgattcctcagcttcaccgtgataaaacaatttggggagacgatgtggaggagttccgtccagagcgttttgaaaatccaagtgcgattccgcagcatgcgtttaaaccgtttggaaacggtcagcgtgcgtgtatcggtcagcagttcgctcttcatgaagcaacgctggtacttggtatgatgctaaaacactttgactttgaagatcatacaaactacgagctcgttattaaagaaaagttaacgttaaaacctgaaggctttgtggtaaaagcaaaatcgaaaggcattccgcttggcggtattccttcacctagcactgaacagtctgctaaaaaagtacgcaaaaaggcagaaaacgctcataatacgccgctgcttgtgctatacggttcaaatgcgggaacagctgaaggaacggcgcgtgatttagcagatattgcaatgagcaaaggatttgcaccgcaggtcgcaacgcttgattcacacgccggaaatcttccgcgcgaaggagctgtattaattgtaacggcgtcttataacggtcatccgcctgataacgcaaagcaatttgtcgactggttagaccaagcgtctgctgatgaagtaaaaggcgttcgctactccgtatttggatgcggcgataaaaactgggctgcgacgtatcaaaaagtgcctgcttttatcgatgaaacgcttgccgctaaaggggcagaaaacatcgctgaccgcggtgaagcagatgcaagcgacgactttgaaggcacatatgaagaatggagtgatcatatgtggagtgacgtagcagcctactttaacctcgacattgaaaacagtgaagataataaatctactctttcacttcaatttgtcgacagcgccgcggatatgccgcttgcgaaaatgcacggtgcgttttcaacgaacgtcgtagcaagcaaagaacttcaacagccaggcagtgcacgaagcacgcgacatcttgaaattgaacttccaaaagaagcttcttatcaagaaggagatcatttaggtgttattcctcgcaactatgaaggaatagtaaaccgtgtaacagcaaggttcggcctaagcgcatcacagcaaatccgtctggaagcagaagaagaaaaattagctcatttgccactcgctaaaacagtatccgtagaagagcttctgcaatacgtggagcttcaagatcctgttacgcgcacgcagcttcgcgcaatggctgctaaaacggtctgcccgccgcataaagtagagcttgaagccttgcttgaaaagcaagcctacaaagaacaagtgctggcaaaacgtttaacaatgcttgaactgcttgaaaaatacccggcgtgtgaaatgaaattcagcgaatttatcgcccttctgccaagcatacgcccgcgctattactcgatttcttcatcacctcgtgtcgatgaaaaacaagcaagcatcacggtcagcgttgtctcaggaccggcgtggagcggatatggagaatataaaggaattgcgtcgaactatcttgccgagctgcaagaaggagatacgattacgtgctttatttccacagatcagtcagaatttacgctgccaaaagaccctgaaacgccgcttatcatggtcggaccgggaacaggcgtcgcgccgtttagaggctttgtgcaggcgcgcaaacagctaaaagaacaaggacagtcacttggagaagcacatttatacttcggctgccgttcacctcatgaagactatctgtatcaagaagagcttgaaaacgcccaaagcgaaggcatcattacgcttcataccgctttttctcgcatgccaaatcagccgaaaacatacgttcagcacgtaatggaacaagacggcaagaaattgattgaacttcttgatcaaggagcgcacttctatatttgcggagacggaagccaaatggcacctgccgttgaagcaacgcttatgaaaagctatgctgacgttcaccaagtgagtgaagcagacgctcgcttatggctgcagcagctagaagaaaaaggccgatacgcaaaagacgtgtgggctggg

SEQ ID NO: 308 - protein, 1049 aa, synthetic construct
  REGION 1..1049: note = Variant of cytochrome P450
MTIKEMPQPKTFGELKNLPLLNTDKPVQALMRIADELGEIFKFEAPGSVTRFLSSQRLIKEACDESRFDKNLSQCLKFGRDFLGDGLFTSWTHEPNWKKAHNILGPSFSQRAMKRYHAMMVDIAVQLVQKWERLNADEHIEVSEDMTRLTLDTIGLCGFNYRFNSFYRDQPHPFIVSVVRALDEVMNKLQRANPDDPAYDENKRQCQEDIKVMNDYVDKIIADRKARGEQSHDLLTQMLNGKDPETGEPLDDGNIRYQIITFLIAGHETTSGLLSFALYFLVKNPHVLQKVAEEAARVLVDPVPSYKQVKQLKYVGMVLNEALRLWPTGPAFSLYAKEDTVLGGEYPLTKGDEVMVLIPQLHRDKTIWGDDVEEFRPERFENPSAIPQHAFKPFGNGQRACIGQQFALHEATLVLGMMLKHFDFEDHTNYELVIKEKLTLKPEGFVVKAKSKGIPLGGIPSPSTEQSAKKVRKKAENAHNTPLLVLYGSNAGTAEGTARDLADIAMSKGFAPQVATLDSHAGNLPREGAVLIVTASYNGHPPDNAKQFVDWLDQASADEVKGVRYSVFGCGDKNWAATYQKVPAFIDETLAAKGAENIADRGEADASDDFEGTYEEWSDHMWSDVAAYFNLDIENSEDNKSTLSLQFVDSAADMPLAKMHGAFSTNVVASKELQQPGSARSTRHLEIELPKEASYQEGDHLGVIPRNYEGIVNRVTARFGLSASQQIRLEAEEEKLAHLPLAKTVSVEELLQYVELQDPVTRTQLRAMAAKTVCPPHKVELEALLEKQAYKEQVLAKRLTMLELLEKYPACEMKFSEFIALLPSIRPRYYSISSSPRVDEKQASITVSVVSGPAWSGYGEYKGIASNYLAELQEGDTITCFISTDQSEFTLPKDPETPLIMVGPGTGVAPFRGFVQARKQLKEQGQSLGEAHLYFGCRSPHEDYLYQEELENAQSEGIITLHTAFSRMPNQPKTYVQHVMEQDGKKLIELLDQGAHFYICGDGSQMAPAVEATLMKSYADVHQVSEADARLWLQQLEEKGRYAKDVWAG

SEQ ID NO: 309 - DNA, 3147 bp, synthetic construct
  misc_feature 1..3147: note = Variant of cytochrome P450
  source 1..3147: mol_type = other DNA
atgacaattaaggaaatgcctcagcctaagacgtttggagaacttaaaaatttaccgttattaaacacagataaaccggttcaagctttgatgcgtattgcggatgaattaggagaaatctttaaattcgaggcgcctggtagcgtaacgcgctttttatcaagtcagcgtctaattaaagaagcatgcgatgaatcacgctttgataaaaacttaagtcaaggcctgaaatttgggcgtgattttctgggagacgggttatttacaagctggacgcatgaaccgaattggaaaaaagcgcataatatcttaggcccaagctttagtcagcgtgcaatgaaacgttatcatgcgatgatggtcgatatcgccgtgcagcttgttcaaaagtgggagcgtctaaatgcagatgagcatattgaagtatcggaagacatgacacgtttaacgctggatacaattggtctttgcggcttcaactatcgctttaacagcttttaccgagatcagcctcatccatttattgtgagtgttgtgcgtaggctggatgaagtaatgaacaagctgcagcgagcaaatccagacgacccagcttatgatgaaaacaagcgccagtgtcaagaagatatcaaggtgatgaacgactatgtcgataaaattattgcagatcgcaaagcaaggggtgaacaaagccatgatttattaacgcagatgctaaacggaaaagatccagaaacgggtgagccgcttgatgacgggaacattcgttatcaaattattacattcttaatcgcgggacacgaaacaacaagtggtcttttatcatttgcgctgtatttcttagtgaaaaatccacatgtattacaaaaagtagcagaagaagcagcacgagttctagtagatcctgttccaagctacaaacaagtcaaacagcttaaatatgtcggcatggtcttaaacgaagcgctgcgcttatggccaactggtcctgcgttttccctatatgcaaaagaagatacggtgcttggaggagaatatcctttaaccaaaggcgacgaagtaatggttctgattcctcagcttcaccgtgataaaacaatttggggagacgatgtggaggagttccgtccagagcgttttgaaaatccaagtgcgattccgcagcatgcgtttaaaccgtttggaaacggtcagcgtgcgtgtatcggtcagcagttcgctcttcatgaagcaacgctggtacttggtatgatgctaaaacactttgactttgaagatcatacaaactacgagctcgttattaaagaaaagttaacgttaaaacctgaaggctttgtggtaaaagcaaaatcgaaaggcattccgcttggcggtattccttcacctagcactgaacagtctgctaaaaaagtacgcaaaaaggcagaaaacgctcataatacgccgctgcttgtgctatacggttcaaatgcgggaacagctgaaggaacggcgcgtgatttagcagatattgcaatgagcaaaggatttgcaccgcaggtcgcaacgcttgattcacacgccggaaatcttccgcgcgaaggagctgtattaattgtaacggcgtcttataacggtcatccgcctgataacgcaaagcaatttgtcgactggttagaccaagcgtctgctgatgaagtaaaaggcgttcgctactccgtatttggatgcggcgataaaaactgggctgcgacgtatcaaaaagtgcctgcttttatcgatgaaacgcttgccgctaaaggggcagaaaacatcgctgaccgcggtgaagcagatgcaagcgacgactttgaaggcacatatgaagaatggagtgatcatatgtggagtgacgtagcagcctactttaacctcgacattgaaaacagtgaagataataaatctactctttcacttcaatttgtcgacagcgccgcggatatgccgcttgcgaaaatgcacggtgcgttttcaacgaacgtcgtagcaagcaaagaacttcaacagccaggcagtgcacgaagcacgcgacatcttgaaattgaacttccaaaagaagcttcttatcaagaaggagatcatttaggtgttattcctcgcaactatgaaggaatagtaaaccgtgtaacagcaaggttcggcctaagcgcatcacagcaaatccgtctggaagcagaagaagaaaaattagctcatttgccactcgctaaaacagtatccgtagaagagcttctgcaatacgtggagcttcaagatcctgttacgcgcacgcagcttcgcgcaatggctgctaaaacggtctgcccgccgcataaagtagagcttgaagccttgcttgaaaagcaagcctacaaagaacaagtgctggcaaaacgtttaacaatgcttgaactgcttgaaaaatacccggcgtgtgaaatgaaattcagcgaatttatcgcccttctgccaagcatacgcccgcgctattactcgatttcttcatcacctcgtgtcgatgaaaaacaagcaagcatcacggtcagcgttgtctcaggaccggcgtggagcggatatggagaatataaaggaattgcgtcgaactatcttgccgagctgcaagaaggagatacgattacgtgctttatttccacagatcagtcagaatttacgctgccaaaagaccctgaaacgccgcttatcatggtcggaccgggaacaggcgtcgcgccgtttagaggctttgtgcaggcgcgcaaacagctaaaagaacaaggacagtcacttggagaagcacatttatacttcggctgccgttcacctcatgaagactatctgtatcaagaagagcttgaaaacgcccaaagcgaaggcatcattacgcttcataccgctttttctcgcatgccaaatcagccgaaaacatacgttcagcacgtaatggaacaagacggcaagaaattgattgaacttcttgatcaaggagcgcacttctatatttgcggagacggaagccaaatggcacctgccgttgaagcaacgcttatgaaaagctatgctgacgttcaccaagtgagtgaagcagacgctcgcttatggctgcagcagctagaagaaaaaggccgatacgcaaaagacgtgtgggctggg

SEQ ID NO: 310 - protein, 1049 aa, synthetic construct
  REGION 1..1049: note = Variant of cytochrome P450
MTIKEMPQPKTFGELKNLPLLNTDKPVQALMRIADELGEIFKFEAPGSVTRFLSSQRLIKEACDESRFDKNLSQGLKFGRDFLGDGLFTSWTHEPNWKKAHNILGPSFSQRAMKRYHAMMVDIAVQLVQKWERLNADEHIEVSEDMTRLTLDTIGLCGFNYRFNSFYRDQPHPFIVSVVRRLDEVMNKLQRANPDDPAYDENKRQCQEDIKVMNDYVDKIIADRKARGEQSHDLLTQMLNGKDPETGEPLDDGNIRYQIITFLIAGHETTSGLLSFALYFLVKNPHVLQKVAEEAARVLVDPVPSYKQVKQLKYVGMVLNEALRLWPTGPAFSLYAKEDTVLGGEYPLTKGDEVMVLIPQLHRDKTIWGDDVEEFRPERFENPSAIPQHAFKPFGNGQRACIGQQFALHEATLVLGMMLKHFDFEDHTNYELVIKEKLTLKPEGFVVKAKSKGIPLGGIPSPSTEQSAKKVRKKAENAHNTPLLVLYGSNAGTAEGTARDLADIAMSKGFAPQVATLDSHAGNLPREGAVLIVTASYNGHPPDNAKQFVDWLDQASADEVKGVRYSVFGCGDKNWAATYQKVPAFIDETLAAKGAENIADRGEADASDDFEGTYEEWSDHMWSDVAAYFNLDIENSEDNKSTLSLQFVDSAADMPLAKMHGAFSTNVVASKELQQPGSARSTRHLEIELPKEASYQEGDHLGVIPRNYEGIVNRVTARFGLSASQQIRLEAEEEKLAHLPLAKTVSVEELLQYVELQDPVTRTQLRAMAAKTVCPPHKVELEALLEKQAYKEQVLAKRLTMLELLEKYPACEMKFSEFIALLPSIRPRYYSISSSPRVDEKQASITVSVVSGPAWSGYGEYKGIASNYLAELQEGDTITCFISTDQSEFTLPKDPETPLIMVGPGTGVAPFRGFVQARKQLKEQGQSLGEAHLYFGCRSPHEDYLYQEELENAQSEGIITLHTAFSRMPNQPKTYVQHVMEQDGKKLIELLDQGAHFYICGDGSQMAPAVEATLMKSYADVHQVSEADARLWLQQLEEKGRYAKDVWAG

SEQ ID NO: 311 - DNA, 3147 bp, synthetic construct
  misc_feature 1..3147: note = Variant of cytochrome P450
  source 1..3147: mol_type = other DNA
atgacaattaaggaaatgcctcagcctaagacgtttggagaacttaaaaatttaccgttattaaacacagataaaccggttcaagctttgatgcgtattgcggatgaattaggagaaatctttaaattcgaggcgcctggtagcgtaacgcgctttttatcaagtcagcgtctaattaaagaagcatgcgatgaatcacgctttgataaaaacttaagtcaaggcctgaaatttgggcgtgattttctgggagacgggttatttacaagctggacgcatgaaccgaattggaaaaaagcgcataatatcttaggcccaagctttagtcagcgtgcaatgaaacgttatcatgcgatgatggtcgatatcgccgtgcagcttgttcaaaagtgggagcgtctaaatgcagatgagcatattgaagtatcggaagacatgacacgtttaacgctggatacaattggtctttgcggcttcaactatcgctttaacagcttttaccgagatcagcctcatccatttattgtgagtggggtgcgtgcactggatgaagtaatgaacaagctgcagcgagcaaatccagacgacccagcttatgatgaaaacaagcgccagtgtcaagaagatatcaaggtgatgaacgactatgtcgataaaattattgcagatcgcaaagcaaggggtgaacaaagccatgatttattaacgcagatgctaaacggaaaagatccagaaacgggtgagccgcttgatgacgggaacattcgttatcaaattattacattcttaatcgcgggacacgaaacaacaagtggtcttttatcatttgcgctgtatttcttagtgaaaaatccacatgtattacaaaaagtagcagaagaagcagcacgagttctagtagatcctgttccaagctacaaacaagtcaaacagcttaaatatgtcggcatggtcttaaacgaagcgctgcgcttatggccaactggtcctgcgttttccctatatgcaaaagaagatacggtgcttggaggagaatatcctttaaccaaaggcgacgaagtaatggttctgattcctcagcttcaccgtgataaaacaatttggggagacgatgtggaggagttccgtccagagcgttttgaaaatccaagtgcgattccgcagcatgcgtttaaaccgtttggaaacggtcagcgtgcgtgtatcggtcagcagttcgctcttcatgaagcaacgctggtacttggtatgatgctaaaacactttgactttgaagatcatacaaactacgagctcgttattaaagaaaagttaacgttaaaacctgaaggctttgtggtaaaagcaaaatcgaaaggcattccgcttggcggtattccttcacctagcactgaacagtctgctaaaaaagtacgcaaaaaggcagaaaacgctcataatacgccgctgcttgtgctatacggttcaaatgcgggaacagctgaaggaacggcgcgtgatttagcagatattgcaatgagcaaaggatttgcaccgcaggtcgcaacgcttgattcacacgccggaaatcttccgcgcgaaggagctgtattaattgtaacggcgtcttataacggtcatccgcctgataacgcaaagcaatttgtcgactggttagaccaagcgtctgctgatgaagtaaaaggcgttcgctactccgtatttggatgcggcgataaaaactgggctgcgacgtatcaaaaagtgcctgcttttatcgatgaaacgcttgccgctaaaggggcagaaaacatcgctgaccgcggtgaagcagatgcaagcgacgactttgaaggcacatatgaagaatggagtgatcatatgtggagtgacgtagcagcctactttaacctcgacattgaaaacagtgaagataataaatctactctttcacttcaatttgtcgacagcgccgcggatatgccgcttgcgaaaatgcacggtgcgttttcaacgaacgtcgtagcaagcaaagaacttcaacagccaggcagtgcacgaagcacgcgacatcttgaaattgaacttccaaaagaagcttcttatcaagaaggagatcatttaggtgttattcctcgcaactatgaaggaatagtaaaccgtgtaacagcaaggttcggcctaagcgcatcacagcaaatccgtctggaagcagaagaagaaaaattagctcatttgccactcgctaaaacagtatccgtagaagagcttctgcaatacgtggagcttcaagatcctgttacgcgcacgcagcttcgcgcaatggctgctaaaacggtctgcccgccgcataaagtagagcttgaagccttgcttgaaaagcaagcctacaaagaacaagtgctggcaaaacgtttaacaatgcttgaactgcttgaaaaatacccggcgtgtgaaatgaaattcagcgaatttatcgcccttctgccaagcatacgcccgcgctattactcgatttcttcatcacctcgtgtcgatgaaaaacaagcaagcatcacggtcagcgttgtctcaggaccggcgtggagcggatatggagaatataaaggaattgcgtcgaactatcttgccgagctgcaagaaggagatacgattacgtgctttatttccacagatcagtcagaatttacgctgccaaaagaccctgaaacgccgcttatcatggtcggaccgggaacaggcgtcgcgccgtttagaggctttgtgcaggcgcgcaaacagctaaaagaacaaggacagtcacttggagaagcacatttatacttcggctgccgttcacctcatgaagactatctgtatcaagaagagcttgaaaacgcccaaagcgaaggcatcattacgcttcataccgctttttctcgcatgccaaatcagccgaaaacatacgttcagcacgtaatggaacaagacggcaagaaattgattgaacttcttgatcaaggagcgcacttctatatttgcggagacggaagccaaatggcacctgccgttgaagcaacgcttatgaaaagctatgctgacgttcaccaagtgagtgaagcagacgctcgcttatggctgcagcagctagaagaaaaaggccgatacgcaaaagacgtgtgggctggg

SEQ ID NO: 312 - protein, 1049 aa, synthetic construct
  REGION 1..1049: note = Variant of cytochrome P450
MTIKEMPQPKTFGELKNLPLLNTDKPVQALMRIADELGEIFKFEAPGSVTRFLSSQRLIKEACDESRFDKNLSQGLKFGRDFLGDGLFTSWTHEPNWKKAHNILGPSFSQRAMKRYHAMMVDIAVQLVQKWERLNADEHIEVSEDMTRLTLDTIGLCGFNYRFNSFYRDQPHPFIVSGVRALDEVMNKLQRANPDDPAYDENKRQCQEDIKVMNDYVDKIIADRKARGEQSHDLLTQMLNGKDPETGEPLDDGNIRYQIITFLIAGHETTSGLLSFALYFLVKNPHVLQKVAEEAARVLVDPVPSYKQVKQLKYVGMVLNEALRLWPTGPAFSLYAKEDTVLGGEYPLTKGDEVMVLIPQLHRDKTIWGDDVEEFRPERFENPSAIPQHAFKPFGNGQRACIGQQFALHEATLVLGMMLKHFDFEDHTNYELVIKEKLTLKPEGFVVKAKSKGIPLGGIPSPSTEQSAKKVRKKAENAHNTPLLVLYGSNAGTAEGTARDLADIAMSKGFAPQVATLDSHAGNLPREGAVLIVTASYNGHPPDNAKQFVDWLDQASADEVKGVRYSVFGCGDKNWAATYQKVPAFIDETLAAKGAENIADRGEADASDDFEGTYEEWSDHMWSDVAAYFNLDIENSEDNKSTLSLQFVDSAADMPLAKMHGAFSTNVVASKELQQPGSARSTRHLEIELPKEASYQEGDHLGVIPRNYEGIVNRVTARFGLSASQQIRLEAEEEKLAHLPLAKTVSVEELLQYVELQDPVTRTQLRAMAAKTVCPPHKVELEALLEKQAYKEQVLAKRLTMLELLEKYPACEMKFSEFIALLPSIRPRYYSISSSPRVDEKQASITVSVVSGPAWSGYGEYKGIASNYLAELQEGDTITCFISTDQSEFTLPKDPETPLIMVGPGTGVAPFRGFVQARKQLKEQGQSLGEAHLYFGCRSPHEDYLYQEELENAQSEGIITLHTAFSRMPNQPKTYVQHVMEQDGKKLIELLDQGAHFYICGDGSQMAPAVEATLMKSYADVHQVSEADARLWLQQLEEKGRYAKDVWAG

SEQ ID NO: 313 - DNA, 3147 bp, synthetic construct
  misc_feature 1..3147: note = Variant of cytochrome P450
  source 1..3147: mol_type = other DNA
atgacaattaaggaaatgcctcagcctaagacgtttggagaacttaaaaatttaccgttattaaacacagataaaccggttcaagctttgatgcgtattgcggatgaattaggagaaatctttaaattcgaggcgcctggtagcgtaacgcgctttttatcaagtcagcgtctaattaaagaagcatgcgatgaaagtcgctttgataaaaacttaagtcaatcgctgaaatttgcccgtgattttctgggagacgggttatttacaagctggacgcatgaaccgaattggaaaaaagcgcataatatcttaggcccaagctttagtcagcgtgcaatgaaacgttatcatgcgatgatggtcgatatcgccgtgcagcttgttcaaaagtgggagcgtctaaatgcagatgagcatattgaagtatcggaagacatgacacgtttaacgctggatacaattggtctttgcggcttcaactatcgctttaacagcttttaccgagatcagcctcatccatttattgtgtcggtagtgcgtgcactggatgaagtaatgaacaagctgcagcgagcaaatccagacgacccagcttatgatgaaaacaagcgccagtgtcaagaagatatcaaggtgatgaacgactatgtcgataaaattattgcagatcgcaaagcaaggggtgaacaaagccatgatttattaacgcagatgctaaacggaaaagatccagaaacgggtgagccgcttgatgacgggaacattcgttatcaaattattacattcttaatcgcgggacacgaaacaacaagtggtcttttatcatttgcgctgtatttcttagtgaaaaatccacatgtattacaaaaagtagcagaagaagcagcacgagttctagtagatcctgttccaagctacaaacaagtcaaacagcttaaatatgtcggcatggtcttaaacgaagcgctgcgcttatggccaactggtcctgcgttttccctatatgcaaaagaagatacggtgcttggaggagaatatcctttaaccaaaggcgacgaagtaatggttctgattcctcagcttcaccgtgataaaacaatttggggagacgatgtggaggagttccgtccagagcgttttgaaaatccaagtgcgattccgcagcatgcgtttaaaccgtttggaaacggtcagcgtgcgtgtatcggtcagcagttcgctcttcatgaagcaacgctggtacttggtatgatgctaaaacactttgactttgaagatcatacaaactacgagctcgttattaaggaacgcttaacgttaaaacctgaaggctttgtggtaaaagcaaaatcgaaaggcattccgcttggcctgattccttcacctagcactgaacagtctgctaaaaaagtacgcaaaaaggcagaaaacgctcataatacgccgctgcttgtgctatacggttcaaatgcgggaacagctgaaggaacggcgcgtgatttagcagatattgcaatgagcaaaggatttgcaccgcaggtcgcaacgcttgattcacacgccggaaatcttccgcgcgaaggagctgtattaattgtaacggcgtcttataacggtcatccgcctgataacgcaaagcaatttgtcgactggttagaccaagcgtctgctgatgaagtaaaaggcgttcgctactccgtatttggatgcggcgataaaaactgggctgcgacgtatcaaaaagtgcctgcttttatcgatgaaacgcttgccgctaaaggggcagaaaacatcgctgaccgcggtgaagcagatgcaagcgacgactttgaaggcacgtatgaagaatggagtgatcatatgtggagtgacgtagcagcctactttaacctcgacattgaaaacagtgaagataataaatctactctttcacttcaatttgtcgacagcgccgcggatatgccgcttgcgaaaatgcacggtgcgttttcaacgaacgtcgtagcaagcaaagaacttcaacagccaggcagtgcacgaagcacgcgacatcttgaaattgaacttccaaaagaagcttcttatcaagaaggagatcatttaggtgttattcctcgcaactatgaaggaatagtaaaccgtgtaacagcaaggttcggcctaagcgcatcacagcaaatccgtctggaagcagaagaagaaaaattagctcatttgccactcgctaaaacagtatccgtagaagagcttctgcaatacgtggagcttcaagatcctgttacgcgcacgcagcttcgcgcaatggctgctaaaacggtctgcccgccgcataaagtagagcttgaagccttgcttgaaaagcaagcctacaaagaacaagtgctggcaaaacgtttaacaatgcttgaactgcttgaaaaatacccggcgtgtgaaatgaaattcagcgaatttatcgcccttctgccaagcatacgcccgcgctattactcgatttcttcatcacctcgtgtcgatgaaaaacaagcaagcatcacggtcagcgttgtctcaggaccggcgtggagcggatatggagaatataaaggaattgcgtcgaactatcttgccgagctgcaagaaggagatacgattacgtgctttatttccacagatcagtcagaatttacgctgccaaaagaccctgaaacgccgcttatcatggtcggaccgggaacaggcgtcgcgccgtttagaggctttgtgcaggcgcgcaaacagctaaaagaacaaggacagtcacttggagaagcacatttatacttcggctgccgttcacctcatgaagactatctgtatcaagaagagcttgaaaacgcccaaagcgaaggcatcattacgcttcataccgctttttctcgcatgccaaatcagccgaaaacatacgttcagcacgtaatggaacaagacggcaagaaattgattgaacttcttgatcaaggagcgcacttctatatttgcggagacggaagccaaatggcacctgccgttgaagcaacgcttatgaaaagctatgctgacgttcaccaagtgagtgaagcagacgctcgcttatggctgcagcagctagaagaaaaaggccgatacgcaaaagacgtgtgggctggg

SEQ ID NO: 314 - protein, 1049 aa, synthetic construct
  REGION 1..1049: note = Variant of cytochrome P450
MTIKEMPQPKTFGELKNLPLLNTDKPVQALMRIADELGEIFKFEAPGSVTRFLSSQRLIKEACDESRFDKNLSQSLKFARDFLGDGLFTSWTHEPNWKKAHNILGPSFSQRAMKRYHAMMVDIAVQLVQKWERLNADEHIEVSEDMTRLTLDTIGLCGFNYRFNSFYRDQPHPFIVSVVRALDEVMNKLQRANPDDPAYDENKRQCQEDIKVMNDYVDKIIADRKARGEQSHDLLTQMLNGKDPETGEPLDDGNIRYQIITFLIAGHETTSGLLSFALYFLVKNPHVLQKVAEEAARVLVDPVPSYKQVKQLKYVGMVLNEALRLWPTGPAFSLYAKEDTVLGGEYPLTKGDEVMVLIPQLHRDKTIWGDDVEEFRPERFENPSAIPQHAFKPFGNGQRACIGQQFALHEATLVLGMMLKHFDFEDHTNYELVIKERLTLKPEGFVVKAKSKGIPLGLIPSPSTEQSAKKVRKKAENAHNTPLLVLYGSNAGTAEGTARDLADIAMSKGFAPQVATLDSHAGNLPREGAVLIVTASYNGHPPDNAKQFVDWLDQASADEVKGVRYSVFGCGDKNWAATYQKVPAFIDETLAAKGAENIADRGEADASDDFEGTYEEWSDHMWSDVAAYFNLDIENSEDNKSTLSLQFVDSAADMPLAKMHGAFSTNVVASKELQQPGSARSTRHLEIELPKEASYQEGDHLGVIPRNYEGIVNRVTARFGLSASQQIRLEAEEEKLAHLPLAKTVSVEELLQYVELQDPVTRTQLRAMAAKTVCPPHKVELEALLEKQAYKEQVLAKRLTMLELLEKYPACEMKFSEFIALLPSIRPRYYSISSSPRVDEKQASITVSVVSGPAWSGYGEYKGIASNYLAELQEGDTITCFISTDQSEFTLPKDPETPLIMVGPGTGVAPFRGFVQARKQLKEQGQSLGEAHLYFGCRSPHEDYLYQEELENAQSEGIITLHTAFSRMPNQPKTYVQHVMEQDGKKLIELLDQGAHFYICGDGSQMAPAVEATLMKSYADVHQVSEADARLWLQQLEEKGRYAKDVWAG

SEQ ID NO: 315 - DNA, 3147 bp, synthetic construct
  misc_feature 1..3147: note = Variant of cytochrome P450
  source 1..3147: mol_type = other DNA
atgacaattaaggaaatgcctcagcctaagacgtttggagaacttaaaaatttaccgttattaaacacagataaaccggttcaagctttgatgcgtattgcggatgaattaggagaaatctttaaattcgaggcgcctggtagcgtaacgcgctttttatcaagtcagcgtctaattaaagaagcatgcgatgaatcacgctttgataaaaacttaagtcaatcgctgaaatttgcccgtgattttctgggagacgggttatttacaagctggacgcatgaaccgaattggaaaaaagcgcataatatcttaggcccaagctttagtcagcgtgcaatgaaacgttatcatgcgatgatggtcgatatcgccgtgcagcttgttcaaaagtgggagcgtctaaatgcagatgagcatattgaagtatcggaagacatgacacgtttaacgctggatacaattggtctttgcggcttcaactatcgctttaacagcttttaccgagatcagcctcatccatttattgtgagtgttgtgcgtgcactggatgaagtaatgaacaagctgcagcgagcaaatccagacgacccagcttatgatgaaaacaagcgccagtgtcaagaagatatcaaggtgatgaacgactatgtcgataaaattattgcagatcgcaaagcaaggggtgaacaaagccatgatttattaacgcagatgctaaacggaaaagatccagaaacgggtgagccgcttgatgacgggaacattcgttatcaaattattacattcttaatcgcgggacacgaaacaacaagtggtcttttatcatttgcgctgtatttcttagtgaaaaatccacatgtattacaaaaagtagcagaagaagcagcacgagttctagtagatcctgttccaagctacaaacaagtcaaacagcttaaatatgtcggcatggtcttaaacgaagcgctgcgcttatggccaactggtcctgcgttttccctatatgcaaaagaagatacggtgcttggaggagaatatcctttaaccaaaggcgacgaagtaatggttctgattcctcagcttcaccgtgataaaacaatttggggagacgatgtggaggagttccgtccagagcgttttgaaaatccaagtgcgattccgcagcatgcgtttaaaccgtttggaaacggtcagcgtgcgtgtatcggtcagcagttcgctcttcatgaagcaacgctggtacttggtatgatgctaaaacactttgactttgaagatcatacaaactacgagctcgttattaaagaaaagttaacgttaaaacctgaaggctttgtggtaaaagcaaaatcgaaaggcattccgcttggcggtattccttcacctagcactgaacagtctgctaaaaaagtacgcaaaaaggcagaaaacgctcataatacgccgctgcttgtgctatacggttcaaatgcgggaacagctgaaggaacggcgcgtgatttagcagatattgcaatgagcaaaggatttgcaccgcaggtcgcaacgcttgattcacacgccggaaatcttccgcgcgaaggagctgtattaattgtaacggcgtcttataacggtcatccgcctgataacgcaaagcaatttgtcgactggttagaccaagcgtctgctgatgaagtaaaaggcgttcgctactccgtatttggatgcggcgataaaaactgggctgcgacgtatcaaaaagtgcctgcttttatcgatgaaacgcttgccgctaaaggggcagaaaacatcgctgaccgcggtgaagcagatgcaagcgacgactttgaaggcgcgtatgaagaatggagtgatcatatgtggagtgacgtagcagcctactttaacctcgacattgaaaacagtgaagataataaatctactctttcacttcaatttgtcgacagcgccgcggatatgccgcttgcgaaaatgcacggtgcgttttcaacgaacgtcgtagcaagcaaagaacttcaacagccaggcagtgcacgaagcacgcgacatcttgaaattgaacttccaaaagaagcttcttatcaagaaggagatcatttaggtgttattcctcgcaactatgaaggaatagtaaaccgtgtaacagcaaggttcggcctaagcgcatcacagcaaatccgtctggaagcagaagaagaaaaattagctcatttgccactcgctaaaacagtatccgtagaagagcttctgcaatacgtggagcttcaagatcctgttacgcgcacgcagcttcgcgcaatggctgctaaaacggtctgcccgccgcataaagtagagcttgaagccttgcttgaaaagcaagcctacaaagaacaagtgctggcaaaacgtttaacaatgcttgaactgcttgaaaaatacccggcgtgtgaaatgaaattcagcgaatttatcgcccttctgccaagcatacgcccgcgctattactcgatttcttcatcacctcgtgtcgatgaaaaacaagcaagcatcacggtcagcgttgtctcaggaccggcgtggagcggatatggagaatataaaggaattgcgtcgaactatcttgccgagctgcaagaaggagatacgattacgtgctttatttccacagatcagtcagaatttacgctgccaaaagaccctgaaacgccgcttatcatggtcggaccgggaacaggcgtcgcgccgtttagaggctttgtgcaggcgcgcaaacagctaaaagaacaaggacagtcacttggagaagcacatttatacttcggctgccgttcacctcatgaagactatctgtatcaagaagagcttgaaaacgcccaaagcgaaggcatcattacgcttcataccgctttttctcgcatgccaaatcagccgaaaacatacgttcagcacgtaatggaacaagacggcaagaaattgattgaacttcttgatcaaggagcgcacttctatatttgcggagacggaagccaaatggcacctgccgttgaagcaacgcttatgaaaagctatgctgacgttcaccaagtgagtgaagcagacgctcgcttatggctgcagcagctagaagaaaaaggccgatacgcaaaagacgtgtgggctggg

SEQ ID NO: 316 - protein, 1049 aa, synthetic construct
  REGION 1..1049: note = Variant of cytochrome P450
MTIKEMPQPKTFGELKNLPLLNTDKPVQALMRIADELGEIFKFEAPGSVTRFLSSQRLIKEACDESRFDKNLSQSLKFARDFLGDGLFTSWTHEPNWKKAHNILGPSFSQRAMKRYHAMMVDIAVQLVQKWERLNADEHIEVSEDMTRLTLDTIGLCGFNYRFNSFYRDQPHPFIVSVVRALDEVMNKLQRANPDDPAYDENKRQCQEDIKVMNDYVDKIIADRKARGEQSHDLLTQMLNGKDPETGEPLDDGNIRYQIITFLIAGHETTSGLLSFALYFLVKNPHVLQKVAEEAARVLVDPVPSYKQVKQLKYVGMVLNEALRLWPTGPAFSLYAKEDTVLGGEYPLTKGDEVMVLIPQLHRDKTIWGDDVEEFRPERFENPSAIPQHAFKPFGNGQRACIGQQFALHEATLVLGMMLKHFDFEDHTNYELVIKEKLTLKPEGFVVKAKSKGIPLGGIPSPSTEQSAKKVRKKAENAHNTPLLVLYGSNAGTAEGTARDLADIAMSKGFAPQVATLDSHAGNLPREGAVLIVTASYNGHPPDNAKQFVDWLDQASADEVKGVRYSVFGCGDKNWAATYQKVPAFIDETLAAKGAENIADRGEADASDDFEGAYEEWSDHMWSDVAAYFNLDIENSEDNKSTLSLQFVDSAADMPLAKMHGAFSTNVVASKELQQPGSARSTRHLEIELPKEASYQEGDHLGVIPRNYEGIVNRVTARFGLSASQQIRLEAEEEKLAHLPLAKTVSVEELLQYVELQDPVTRTQLRAMAAKTVCPPHKVELEALLEKQAYKEQVLAKRLTMLELLEKYPACEMKFSEFIALLPSIRPRYYSISSSPRVDEKQASITVSVVSGPAWSGYGEYKGIASNYLAELQEGDTITCFISTDQSEFTLPKDPETPLIMVGPGTGVAPFRGFVQARKQLKEQGQSLGEAHLYFGCRSPHEDYLYQEELENAQSEGIITLHTAFSRMPNQPKTYVQHVMEQDGKKLIELLDQGAHFYICGDGSQMAPAVEATLMKSYADVHQVSEADARLWLQQLEEKGRYAKDVWAG

SEQ ID NO: 317 - DNA, 3147 bp, synthetic construct
  misc_feature 1..3147: note = Variant of cytochrome P450
  source 1..3147: mol_type = other DNA
atgacaattaaggaaatgcctcagcctaagacgtttggagaacttaaaaatttaccgttattaaacacagataaaccggttcaagctttgatgcgtattgcggatgaattaggagaaatctttaaattcgaggcgcctggtagcgtaacgcgctttttatcaagtcagcgtctaattaaagaagcatgcgatgaacgtcgctttgataaaaacttaagtcaatcgctgaaatttgcccgtgattttctgggagacgggttatttacaagctggacgcatgaaccgaattggaaaaaagcgcataatatcttaggcccaagctttagtcagcgtgcaatgaaacgttatcatgcgatgatggtcgatatcgccgtgcagcttgttcaaaagtgggagcgtctaaatgcagatgagcatattgaagtatcggaagacatgacacgtttaacgctggatacaattggtctttgcggcttcaactatcgctttaacagcttttaccgagatcagcctcatccatttattgtggcggtagtgcgtgcactggatgaagtaatgaacaagctgcagcgagcaaatccagacgacccagcttatgatgaaaacaagcgccagtttcaagaagatatcaaggtgatgaacgactatgtcgataaaattattgcagatcgcaaagcaaggggtgaacaaagccatgatttattaacgcagatgctaaacggaaaagatccagaaacgggtgagccgcttgatgacgggaacattcgttatcaaattattacattcttaatcgcgggacacgaaacaacaagtggtcttttatcatttgcgctgtatttcttagtgaaaaatccacatgtattacaaaaagtagcagaagaagcagcacgagttctagtagatcctgttccaagctacaaacaagtcaaacagcttaaatatgtcggcatggtcttaaacgaagcgctgcgcttatggccaactggtcctgcgttttccctatatgcaaaagaagatacggtgcttggaggagaatatcctttaaccaaaggcgacgaagtaatggttctgattcctcagcttcaccgtgataaaacaatttggggagacgatgtggaggagttccgtccagagcgttttgaaaatccaagtgcgattccgcagcatgcgtttaaaccgtttggaaacggtcagcgtgcgtgtatcggtcagcagttcgctcttcatgaagcaacgctggtacttggtatgatgctaaaacactttgactttgaagatcatacaaactacgagctcgttattggcgaaaaattaacgttaaaacctgaaggctttgtggtaaaagcaaaatcgaaaggcattccgcttggcctgattccttcacctagcactgaacagtctgctaaaaaagtacgcaaaaaggcagaaaacgctcataatacgccgctgcttgtgctatacggttcaaatgcgggaacagctgaaggaacggcgcgtgatttagcagatattgcaatgagcaaaggatttgcaccgcaggtcgcaacgcttgattcacacgccggaaatcttccgcgcgaaggagctgtattaattgtaacggcgtcttataacggtcatccgcctgataacgcaaagcaatttgtcgactggttagaccaagcgtctgctgatgaagtaaaaggcgttcgctactccgtatttggatgcggcgataaaaactgggctgcgacgtatcaaaaagtgcctgcttttatcgatgaaacgcttgccgctaaaggggcagaaaacatcgctgaccgcggtgaagcagatgcaagcgacgactttgaaggcgcgtatgaagaatggagtgatcatatgtggagtgacgtagcagcctactttaacctcgacattgaaaacagtgaagataataaatctactctttcacttcaatttgtcgacagcgccgcggatatgccgcttgcgaaaatgcacggtgcgttttcaacgaacgtcgtagcaagcaaagaacttcaacagccaggcagtgcacgaagcacgcgacatcttgaaattgaacttccaaaagaagcttcttatcaagaaggagatcatttaggtgttattcctcgcaactatgaaggaatagtaaaccgtgtaacagcaaggttcggcctaagcgcatcacagcaaatccgtctggaagcagaagaagaaaaattagctcatttgccactcgctaaaacagtatccgtagaagagcttctgcaatacgtggagcttcaagatcctgttacgcgcacgcagcttcgcgcaatggctgctaaaacggtctgcccgccgcataaagtagagcttgaagccttgcttgaaaagcaagcctacaaagaacaagtgctggcaaaacgtttaacaatgcttgaactgcttgaaaaatacccggcgtgtgaaatgaaattcagcgaatttatcgcccttctgccaagcatacgcccgcgctattactcgatttcttcatcacctcgtgtcgatgaaaaacaagcaagcatcacggtcagcgttgtctcaggaccggcgtggagcggatatggagaatataaaggaattgcgtcgaactatcttgccgagctgcaagaaggagatacgattacgtgctttatttccacagatcagtcagaatttacgctgccaaaagaccctgaaacgccgcttatcatggtcggaccgggaacaggcgtcgcgccgtttagaggctttgtgcaggcgcgcaaacagctaaaagaacaaggacagtcacttggagaagcacatttatacttcggctgccgttcacctcatgaagactatctgtatcaagaagagcttgaaaacgcccaaagcgaaggcatcattacgcttcataccgctttttctcgcatgccaaatcagccgaaaacatacgttcagcacgtaatggaacaagacggcaagaaattgattgaacttcttgatcaaggagcgcacttctatatttgcggagacggaagccaaatggcacctgccgttgaagcaacgcttatgaaaagctatgctgacgttcaccaagtgagtgaagcagacgctcgcttatggctgcagcagctagaagaaaaaggccgatacgcaaaagacgtgtgggctggg

SEQ ID NO: 318 - protein, 1049 aa, synthetic construct
  REGION 1..1049: note = Variant of cytochrome P450
MTIKEMPQPKTFGELKNLPLLNTDKPVQALMRIADELGEIFKFEAPGSVTRFLSSQRLIKEACDERRFDKNLSQSLKFARDFLGDGLFTSWTHEPNWKKAHNILGPSFSQRAMKRYHAMMVDIAVQLVQKWERLNADEHIEVSEDMTRLTLDTIGLCGFNYRFNSFYRDQPHPFIVAVVRALDEVMNKLQRANPDDPAYDENKRQFQEDIKVMNDYVDKIIADRKARGEQSHDLLTQMLNGKDPETGEPLDDGNIRYQIITFLIAGHETTSGLLSFALYFLVKNPHVLQKVAEEAARVLVDPVPSYKQVKQLKYVGMVLNEALRLWPTGPAFSLYAKEDTVLGGEYPLTKGDEVMVLIPQLHRDKTIWGDDVEEFRPERFENPSAIPQHAFKPFGNGQRACIGQQFALHEATLVLGMMLKHFDFEDHTNYELVIGEKLTLKPEGFVVKAKSKGIPLGLIPSPSTEQSAKKVRKKAENAHNTPLLVLYGSNAGTAEGTARDLADIAMSKGFAPQVATLDSHAGNLPREGAVLIVTASYNGHPPDNAKQFVDWLDQASADEVKGVRYSVFGCGDKNWAATYQKVPAFIDETLAAKGAENIADRGEADASDDFEGAYEEWSDHMWSDVAAYFNLDIENSEDNKSTLSLQFVDSAADMPLAKMHGAFSTNVVASKELQQPGSARSTRHLEIELPKEASYQEGDHLGVIPRNYEGIVNRVTARFGLSASQQIRLEAEEEKLAHLPLAKTVSVEELLQYVELQDPVTRTQLRAMAAKTVCPPHKVELEALLEKQAYKEQVLAKRLTMLELLEKYPACEMKFSEFIALLPSIRPRYYSISSSPRVDEKQASITVSVVSGPAWSGYGEYKGIASNYLAELQEGDTITCFISTDQSEFTLPKDPETPLIMVGPGTGVAPFRGFVQARKQLKEQGQSLGEAHLYFGCRSPHEDYLYQEELENAQSEGIITLHTAFSRMPNQPKTYVQHVMEQDGKKLIELLDQGAHFYICGDGSQMAPAVEATLMKSYADVHQVSEADARLWLQQLEEKGRYAKDVWAG

SEQ ID NO: 319 - DNA, 3147 bp, synthetic construct
  misc_feature 1..3147: note = Variant of cytochrome P450
  source 1..3147: mol_type = other DNA
atgacaattaaggaaatgcctcagcctaagacgtttggagaacttaaaaatttaccgttattaaacacagataaaccggttcaagctttgatgcgtattgcggatgaattaggagaaatctttaaattcgaggcgcctggtagcgtaacgcgctttttatcaagtcagcgtctaattaaagaagcatgcgatgaacgtcgctttgataaaaacttaagtcaatcgctgaaatttgcccgtgattttctgggagacgggttatttacaagctggacgcatgaaccgaattggaaaaaagcgcataatatcttaggcccaagctttagtcagcgtgcaatgaaacgttatcatgcgatgatggtcgatatcgccgtgcagcttgttcaaaagtgggagcgtctaaatgcagatgagcatattgaagtatcggaagacatgacacgtttaacgctggatacaattggtctttgcggcttcaactatcgctttaacagcttttaccgagatcagcctcatccatttattgtgagtgttgtgcgtgcactggatgaagtcatgaacaagctgcagcgagcaaatccagacgacccagcttatgatgaaaacaagcgccagtgtcaagaagatatcaaggtgatgaacgactatgtcgataaaattattgcagatcgcaaagcaaggggtgaacaaagccatgatttattaacgcagatgctaaacggaaaagatccagaaacgggtgagccgcttgatgacgggaacattcgttatcaaattattacattcttaatcgcgggacacgaaacaacaagtggtcttttatcatttgcgctgtatttcttagtgaaaaatccacatgtattacaaaaagtagcagaagaagcagcacgagttctagtagatcctgttccaagctacaaacaagtcaaacagcttaaatatgtcggcatggtcttaaacgaagcgctgcgcttatggccaactggtcctgcgttttccctatatgcaaaagaagatacggtgcttggaggagaatatcctttaaccaaaggcgacgaagtaatggttctgattcctcagcttcaccgtgataaaacaatttggggagacgatgtggaggagttccgtccagagcgttttgaaaatccaagtgcgattccgcagcatgcgtttaaaccgtttggaaacggtcagcgtgcgtgtatcggtcagcagttcgctcttcatgaagcaacgctggtacttggtatgatgctaaaacactttgactttgaagatcatacaaactacgagctcgttattaaggaacgcttaacgttaaaacctgaaggctttgtggtaaaagcaaaatcgaaaggcattccgcttggcctgattccttcacctagcactgaacagtctgctaaaaaagtacgcaaaaaggcagaaaacgctcataatacgccgctgcttgtgctatacggttcaaatgcgggaacagctgaaggaacggcgcgtgatttagcagatattgcaatgagcaaaggatttgcaccgcaggtcgcaacgcttgattcacacgccggaaatcttccgcgcgaaggagctgtattaattgtaacggcgtcttataacggtcatccgcctgataacgcaaagcaatttgtcgactggttagaccaagcgtctgctgatgaagtaaaaggcgttcgctactccgtatttggatgcggcgataaaaactgggctgcgacgtatcaaaaagtgcctgcttttatcgatgaaacgcttgccgctaaaggggcagaaaacatcgctgaccgcggtgaagcagatgcaagcgacgactttgaaggcacgtatgaagaatggagtgatcatatgtggagtgacgtagcagcctactttaacctcgacattgaaaacagtgaagataataaatctactctttcacttcaatttgtcgacagcgccgcggatatgccgcttgcgaaaatgcacggtgcgttttcaacgaacgtcgtagcaagcaaagaacttcaacagccaggcagtgcacgaagcacgcgacatcttgaaattgaacttccaaaagaagcttcttatcaagaaggagatcatttaggtgttattcctcgcaactatgaaggaatagtaaaccgtgtaacagcaaggttcggcctaagcgcatcacagcaaatccgtctggaagcagaagaagaaaaattagctcatttgccactcgctaaaacagtatccgtagaagagcttctgcaatacgtggagcttcaagatcctgttacgcgcacgcagcttcgcgcaatggctgctaaaacggtctgcccgccgcataaagtagagcttgaagccttgcttgaaaagcaagcctacaaagaacaagtgctggcaaaacgtttaacaatgcttgaactgcttgaaaaatacccggcgtgtgaaatgaaattcagcgaatttatcgcccttctgccaagcatacgcccgcgctattactcgatttcttcatcacctcgtgtcgatgaaaaacaagcaagcatcacggtcagcgttgtctcaggaccggcgtggagcggatatggagaatataaaggaattgcgtcgaactatcttgccgagctgcaagaaggagatacgattacgtgctttatttccacagatcagtcagaatttacgctgccaaaagaccctgaaacgccgcttatcatggtcggaccgggaacaggcgtcgcgccgtttagaggctttgtgcaggcgcgcaaacagctaaaagaacaaggacagtcacttggagaagcacatttatacttcggctgccgttcacctcatgaagactatctgtatcaagaagagcttgaaaacgcccaaagcgaaggcatcattacgcttcataccgctttttctcgcatgccaaatcagccgaaaacatacgttcagcacgtaatggaacaagacggcaagaaattgattgaacttcttgatcaaggagcgcacttctatatttgcggagacggaagccaaatggcacctgccgttgaagcaacgcttatgaaaagctatgctgacgttcaccaagtgagtgaagcagacgctcgcttatggctgcagcagctagaagaaaaaggccgatacgcaaaagacgtgtgggctggg

SEQ ID NO: 320 - protein, 1049 aa, synthetic construct
  REGION 1..1049: note = Variant of cytochrome P450
MTIKEMPQPKTFGELKNLPLLNTDKPVQALMRIADELGEIFKFEAPGSVTRFLSSQRLIKEACDERRFDKNLSQSLKFARDFLGDGLFTSWTHEPNWKKAHNILGPSFSQRAMKRYHAMMVDIAVQLVQKWERLNADEHIEVSEDMTRLTLDTIGLCGFNYRFNSFYRDQPHPFIVSVVRALDEVMNKLQRANPDDPAYDENKRQCQEDIKVMNDYVDKIIADRKARGEQSHDLLTQMLNGKDPETGEPLDDGNIRYQIITFLIAGHETTSGLLSFALYFLVKNPHVLQKVAEEAARVLVDPVPSYKQVKQLKYVGMVLNEALRLWPTGPAFSLYAKEDTVLGGEYPLTKGDEVMVLIPQLHRDKTIWGDDVEEFRPERFENPSAIPQHAFKPFGNGQRACIGQQFALHEATLVLGMMLKHFDFEDHTNYELVIKERLTLKPEGFVVKAKSKGIPLGLIPSPSTEQSAKKVRKKAENAHNTPLLVLYGSNAGTAEGTARDLADIAMSKGFAPQVATLDSHAGNLPREGAVLIVTASYNGHPPDNAKQFVDWLDQASADEVKGVRYSVFGCGDKNWAATYQKVPAFIDETLAAKGAENIADRGEADASDDFEGTYEEWSDHMWSDVAAYFNLDIENSEDNKSTLSLQFVDSAADMPLAKMHGAFSTNVVASKELQQPGSARSTRHLEIELPKEASYQEGDHLGVIPRNYEGIVNRVTARFGLSASQQIRLEAEEEKLAHLPLAKTVSVEELLQYVELQDPVTRTQLRAMAAKTVCPPHKVELEALLEKQAYKEQVLAKRLTMLELLEKYPACEMKFSEFIALLPSIRPRYYSISSSPRVDEKQASITVSVVSGPAWSGYGEYKGIASNYLAELQEGDTITCFISTDQSEFTLPKDPETPLIMVGPGTGVAPFRGFVQARKQLKEQGQSLGEAHLYFGCRSPHEDYLYQEELENAQSEGIITLHTAFSRMPNQPKTYVQHVMEQDGKKLIELLDQGAHFYICGDGSQMAPAVEATLMKSYADVHQVSEADARLWLQQLEEKGRYAKDVWAG

SEQ ID NO: 321 - DNA, 3147 bp, synthetic construct
  misc_feature 1..3147: note = Variant of cytochrome P450
  source 1..3147: mol_type = other DNA
atgacaattaaggaaatgcctcagcctaagacgtttggagaacttaaaaatttaccgttattaaacacagataaaccggttcaagctttgatgcgtattgcggatgaattaggagaaatctttaaattcgaggcgcctggtagcgtaacgcgctttttatcaagtcagcgtctaattaaagaagcatgcgatgaaagtcgctttgataaaaacttaagtcaatcgctgaaatttgcccgtgattttctgggagacgggttattcacaagctggacgcatgaaccgaattggaaaaaagcgcataatatcttaggcccaagctttagtcagcgtgcaatgaaacgttatcatgcgatgatggtcgatatcgccgtgcagcttgttcaaaagtgggagcgtctaaatgcagatgagcatattgaagtatcggaagacatgacacgtttaacgctggatacaattggtctttgcggcttcaactatcgctttaacagcttttaccgagatcagcctcatccatttattgtggcggtagtgcgtgcactggatgaagtaatgaacaagctgcagcgagcaaatccagacgacccagcttatgatgaaaacaagcgccagtgtcaagaagatatcaaggtgatgaacgactatgtcgataaaattattgcagatcgcaaagcaaggggtgaacaaagccatgatttattaacgcagatgctaaacggaaaagatccagaaacgggtgagccgcttgatgacgggaacattcgttatcaaattattacattcttaatcgcgggacacgaaacaacaagtggtcttttatcatttgcgctgtatttcttagtgaaaaatccacatgtattacaaaaagtagcagaagaagcagcacgagttctagtagatcctgttccaagctacaaacaagtcaaacagcttaaatatgtcggcatggtcttaaacgaagcgctgcgcttatggccaactggtcctgcgttttccctatatgcaaaagaagatacggtgcttggaggagaatatcctttaaccaaaggcgacgaagtaatggttctgattcctcagcttcaccgtgataaaacaatttggggagacgatgtggaggagttccgtccagagcgttttgaaaatccaagtgcgattccgcagcatgcgtttaaaccgtttggaaacggtcagcgtgcgtgtatcggtcagcagttcgctcttcatgaagcaacgctggtacttggtatgatgctaaaacactttgactttgaagatcatacaaactacgagctcgttattggcgaacgcttaacgttaaaacctgaaggctttgtggtaaaagcaaaatcgaaaggcattccgcttggcctgattccttcacctagcactgaacagtctgctaaaaaagtacgcaaaaaggcagaaaacgctcataatacgccgctgcttgtgctatacggttcaaatgcgggaacagctgaaggaacggcgcgtgatttagcagatattgcaatgagcaaaggatttgcaccgcaggtcgcaacgcttgattcacacgccggaaatcttccgcgcgaaggagctgtattaattgtaacggcgtcttataacggtcatccgcctgataacgcaaagcaatttgtcgactggttagaccaagcgtctgctgatgaagtaaaaggcgttcgctactccgtatttggatgcggcgataaaaactgggctgcgacgtatcaaaaagtgcctgcttttatcgatgaaacgcttgccgctaaaggggcagaaaacatcgctgaccgcggtgaagcagatgcaagcgacgactttgaaggcacgtatgaagaatggagtgatcatatgtggagtgacgtagcagcctactttaacctcgacattgaaaacagtgaagataataaatctactctttcacttcaatttgtcgacagcgccgcggatatgccgcttgcgaaaatgcacggtgcgttttcaacgaacgtcgtagcaagcaaagaacttcaacagccaggcagtgcacgaagcacgcgacatcttgaaattgaacttccaaaagaagcttcttatcaagaaggagatcatttaggtgttattcctcgcaactatgaaggaatagtaaaccgtgtaacagcaaggttcggcctaagcgcatcacagcaaatccgtctggaagcagaagaagaaaaattagctcatttgccactcgctaaaacagtatccgtagaagagcttctgcaatacgtggagcttcaagatcctgttacgcgcacgcagcttcgcgcaatggctgctaaaacggtctgcccgccgcataaagtagagcttgaagccttgcttgaaaagcaagcctacaaagaacaagtgctggcaaaacgtttaacaatgcttgaactgcttgaaaaatacccggcgtgtgaaatgaaattcagcgaatttatcgcccttctgccaagcatacgcccgcgctattactcgatttcttcatcacctcgtgtcgatgaaaaacaagcaagcatcacggtcagcgttgtctcaggaccggcgtggagcggatatggagaatataaaggaattgcgtcgaactatcttgccgagctgcaagaaggagatacgattacgtgctttatttccacagatcagtcagaatttacgctgccaaaagaccctgaaacgccgcttatcatggtcggaccgggaacaggcgtcgcgccgtttagaggctttgtgcaggcgcgcaaacagctaaaagaacaaggacagtcacttggagaagcacatttatacttcggctgccgttcacctcatgaagactatctgtatcaagaagagcttgaaaacgcccaaagcgaaggcatcattacgcttcataccgctttttctcgcatgccaaatcagccgaaaacatacgttcagcacgtaatggaacaagacggcaagaaattgattgaacttcttgatcaaggagcgcacttctatatttgcggagacggaagccaaatggcacctgccgttgaagcaacgcttatgaaaagctatgctgacgttcaccaagtgagtgaagcagacgctcgcttatggctgcagcagctagaagaaaaaggccgatacgcaaaagacgtgtgggctggg

SEQ ID NO: 322 - protein, 1049 aa, synthetic construct
  REGION 1..1049: note = Variant of cytochrome P450
MTIKEMPQPKTFGELKNLPLLNTDKPVQALMRIADELGEIFKFEAPGSVTRFLSSQRLIKEACDESRFDKNLSQSLKFARDFLGDGLFTSWTHEPNWKKAHNILGPSFSQRAMKRYHAMMVDIAVQLVQKWERLNADEHIEVSEDMTRLTLDTIGLCGFNYRFNSFYRDQPHPFIVAVVRALDEVMNKLQRANPDDPAYDENKRQCQEDIKVMNDYVDKIIADRKARGEQSHDLLTQMLNGKDPETGEPLDDGNIRYQIITFLIAGHETTSGLLSFALYFLVKNPHVLQKVAEEAARVLVDPVPSYKQVKQLKYVGMVLNEALRLWPTGPAFSLYAKEDTVLGGEYPLTKGDEVMVLIPQLHRDKTIWGDDVEEFRPERFENPSAIPQHAFKPFGNGQRACIGQQFALHEATLVLGMMLKHFDFEDHTNYELVIGERLTLKPEGFVVKAKSKGIPLGLIPSPSTEQSAKKVRKKAENAHNTPLLVLYGSNAGTAEGTARDLADIAMSKGFAPQVATLDSHAGNLPREGAVLIVTASYNGHPPDNAKQFVDWLDQASADEVKGVRYSVFGCGDKNWAATYQKVPAFIDETLAAKGAENIADRGEADASDDFEGTYEEWSDHMWSDVAAYFNLDIENSEDNKSTLSLQFVDSAADMPLAKMHGAFSTNVVASKELQQPGSARSTRHLEIELPKEASYQEGDHLGVIPRNYEGIVNRVTARFGLSASQQIRLEAEEEKLAHLPLAKTVSVEELLQYVELQDPVTRTQLRAMAAKTVCPPHKVELEALLEKQAYKEQVLAKRLTMLELLEKYPACEMKFSEFIALLPSIRPRYYSISSSPRVDEKQASITVSVVSGPAWSGYGEYKGIASNYLAELQEGDTITCFISTDQSEFTLPKDPETPLIMVGPGTGVAPFRGFVQARKQLKEQGQSLGEAHLYFGCRSPHEDYLYQEELENAQSEGIITLHTAFSRMPNQPKTYVQHVMEQDGKKLIELLDQGAHFYICGDGSQMAPAVEATLMKSYADVHQVSEADARLWLQQLEEKGRYAKDVWAG

SEQ ID NO: 323 - DNA, 3147 bp, synthetic construct
  misc_feature 1..3147: note = Variant of cytochrome P450
  source 1..3147: mol_type = other DNA
atgacaattaaggaaatgcctcagcctaagacgtttggagaacttaaaaatttaccgttattaaacacagataaaccggttcaagctttgatgcgtattgcggatgaattaggagaaatctttaaattcgaggcgcctggtagcgtaacgcgctttttatcaagtcagcgtctaattaaagaagcatgcgatgaacgtcgctttgataaaaacttaagtcaatcgctgaaatttggccgtgattttctgggagacgggttattcacaagctggacgcatgaaccgaattggaaaaaagcgcataatatcttaggcccaagctttagtcagcgtgcaatgaaacgttatcatgcgatgatggtcgatatcgccgtgcagcttgttcaaaagtgggagcgtctaaatgcagatgagcatattgaagtatcggaagacatgacacgtttaacgctggatacaattggtctttgcggcttcaactatcgctttaacagcttttaccgagatcagcctcatccatttattgtgagtgttgtgcgtctgctggatgaactgatgaacaagctgcagcgagcaaatccagacgacccagcttatgatgaaaacaagcgccagtgtcaagaagatattaaggtgatgaacgactatgtcgataaaattattgcagatcgcaaagcaaggggtgaacaaagccatgatttattaacgcagatgctaaacggaaaagatccagaaacgggtgagccgcttgatgacgggaacattcgttatcaaattattacattcttaatcgcgggacacgaaacaacaagtggtcttttatcatttgcgctgtatttcttagtgaaaaatccacatgtattacaaaaagtagcagaagaagcagcacgagttctagtagatcctgttccaagctacaaacaagtcaaacagcttaaatatgtcggcatggtcttaaacgaagcgctgcgcttatggccaactggtcctgcgttttccctatatgcaaaagaagatacggtgcttggaggagaatatcctttaaccaaaggcgacgaagtaatggttctgattcctcagcttcaccgtgataaaacaatttggggagacgatgtggaggagttccgtccagagcgttttgaaaatccaagtgcgattccgcagcatgcgtttaaaccgtttggaaacggtcagcgtgcgtgtatcggtcagcagttcgctcttcatgaagcaacgctggtacttggtatgatgctaaaacactttgactttgaagatcatacaaactacgagctcgttattaaggaacgcttaacgttaaaacctgaaggctttgtggtaaaagcaaaatcgaaaggcattccgcttggcggcattccttcacctagcactgaacagtctgctaaaaaagtacgcaaaaaggcagaaaacgctcataatacgccgctgcttgtgctatacggttcaaatgcgggaacagctgaaggaacggcgcgtgatttagcagatattgcaatgagcaaaggatttgcaccgcaggtcgcaacgcttgattcacacgccggaaatcttccgcgcgaaggagctgtattaattgtaacggcgtcttataacggtcatccgcctgataacgcaaagcaatttgtcgactggttagaccaagcgtctgctgatgaagtaaaaggcgttcgctactccgtatttggatgcggcgataaaaactgggctgcgacgtatcaaaaagtgcctgcttttatcgatgaaacgcttgccgctaaaggggcagaaaacatcgctgaccgcggtgaagcagatgcaagcgacgactttgaaggcacgtatgaagaatggagtgatcatatgtggagtgacgtagcagcctactttaacctcgacattgaaaacagtgaagataataaatctactctttcacttcaatttgtcgacagcgccgcggatatgccgcttgcgaaaatgcacggtgcgttttcaacgaacgtcgtagcaagcaaagaacttcaacagccaggcagtgcacgaagcacgcgacatcttgaaattgaacttccaaaagaagcttcttatcaagaaggagatcatttaggtgttattcctcgcaactatgaaggaatagtaaaccgtgtaacagcaaggttcggcctaagcgcatcacagcaaatccgtctggaagcagaagaagaaaaattagctcatttgccactcgctaaaacagtatccgtagaagagcttctgcaatacgtggagcttcaagatcctgttacgcgcacgcagcttcgcgcaatggctgctaaaacggtctgcccgccgcataaagtagagcttgaagccttgcttgaaaagcaagcctacaaagaacaagtgctggcaaaacgtttaacaatgcttgaactgcttgaaaaatacccggcgtgtgaaatgaaattcagcgaatttatcgcccttctgccaagcatacgcccgcgctattactcgatttcttcatcacctcgtgtcgatgaaaaacaagcaagcatcacggtcagcgttgtctcaggaccggcgtggagcggatatggagaatataaaggaattgcgtcgaactatcttgccgagctgcaagaaggagatacgattacgtgctttatttccacagatcagtcagaatttacgctgccaaaagaccctgaaacgccgcttatcatggtcggaccgggaacaggcgtcgcgccgtttagaggctttgtgcaggcgcgcaaacagctaaaagaacaaggacagtcacttggagaagcacatttatacttcggctgccgttcacctcatgaagactatctgtatcaagaagagcttgaaaacgcccaaagcgaaggcatcattacgcttcataccgctttttctcgcatgccaaatcagccgaaaacatacgttcagcacgtaatggaacaagacggcaagaaattgattgaacttcttgatcaaggagcgcacttctatatttgcggagacggaagccaaatggcacctgccgttgaagcaacgcttatgaaaagctatgctgacgttcaccaagtgagtgaagcagacgctcgcttatggctgcagcagctagaagaaaaaggccgatacgcaaaagacgtgtgggctggg

SEQ ID NO: 324 - protein, 1049 aa, synthetic construct
  REGION 1..1049: note = Variant of cytochrome P450
MTIKEMPQPKTFGELKNLPLLNTDKPVQALMRIADELGEIFKFEAPGSVTRFLSSQRLIKEACDERRFDKNLSQSLKFGRDFLGDGLFTSWTHEPNWKKAHNILGPSFSQRAMKRYHAMMVDIAVQLVQKWERLNADEHIEVSEDMTRLTLDTIGLCGFNYRFNSFYRDQPHPFIVSVVRLLDELMNKLQRANPDDPAYDENKRQCQEDIKVMNDYVDKIIADRKARGEQSHDLLTQMLNGKDPETGEPLDDGNIRYQIITFLIAGHETTSGLLSFALYFLVKNPHVLQKVAEEAARVLVDPVPSYKQVKQLKYVGMVLNEALRLWPTGPAFSLYAKEDTVLGGEYPLTKGDEVMVLIPQLHRDKTIWGDDVEEFRPERFENPSAIPQHAFKPFGNGQRACIGQQFALHEATLVLGMMLKHFDFEDHTNYELVIKERLTLKPEGFVVKAKSKGIPLGGIPSPSTEQSAKKVRKKAENAHNTPLLVLYGSNAGTAEGTARDLADIAMSKGFAPQVATLDSHAGNLPREGAVLIVTASYNGHPPDNAKQFVDWLDQASADEVKGVRYSVFGCGDKNWAATYQKVPAFIDETLAAKGAENIADRGEADASDDFEGTYEEWSDHMWSDVAAYFNLDIENSEDNKSTLSLQFVDSAADMPLAKMHGAFSTNVVASKELQQPGSARSTRHLEIELPKEASYQEGDHLGVIPRNYEGIVNRVTARFGLSASQQIRLEAEEEKLAHLPLAKTVSVEELLQYVELQDPVTRTQLRAMAAKTVCPPHKVELEALLEKQAYKEQVLAKRLTMLELLEKYPACEMKFSEFIALLPSIRPRYYSISSSPRVDEKQASITVSVVSGPAWSGYGEYKGIASNYLAELQEGDTITCFISTDQSEFTLPKDPETPLIMVGPGTGVAPFRGFVQARKQLKEQGQSLGEAHLYFGCRSPHEDYLYQEELENAQSEGIITLHTAFSRMPNQPKTYVQHVMEQDGKKLIELLDQGAHFYICGDGSQMAPAVEATLMKSYADVHQVSEADARLWLQQLEEKGRYAKDVWAG

SEQ ID NO: 325 - DNA, 3147 bp, synthetic construct
  misc_feature 1..3147: note = Variant of cytochrome P450
  source 1..3147: mol_type = other DNA
atgacaattaaggaaatgcctcagcctaagacgtttggagaacttaaaaatttaccgttattaaacacagataaaccggttcaagctttgatgcgtattgcggatgaattaggagaaatctttaaattcgaggcgcctggtagcgtaacgcgctttttatcaagtcagcgtctaattaaagaagcatgcgatgaatcacgctttgataaaaacttaagtcaatcgctgaaatttgcccgtgattttctgggagacgggttatttacaagctggacgcatgaaccgaattggaaaaaagcgcataatatcttaggcccaagctttagtcagcgtgcaatgaaacgttatcatgcgatgatggtcgatatcgccgtgcagcttgttcaaaagtgggagcgtctaaatgcagatgagcatattgaagtatcggaagacatgacacgtttaacgctggatacaattggtctttgcggcttcaactatcgctttaacagcttttaccgagatcagcctcatccatttattgtgagtgttgtgcgtgcactggatgaagtaatgaacaagctgcagcgagcaaatccagacgacccagcttatgatgaaaacaagcgccagtgtcaagaagatatcaaggtgatgaacgactatgtcgataaaattattgcagatcgcaaagcaaggggtgaacaaagccatgatttattaacgcagatgctaaacggaaaagatccagaaacgggtgagccgcttgatgacgggaacattcgttatcaaattattacattcttaatcgcgggacacgaaacaacaagtggtcttttatcatttgcgctgtatttcttagtgaaaaatccacatgtattacaaaaagtagcagaagaagcagcacgagttctagtagatcctgttccaagctacaaacaagtcaaacagcttaaatatgtcggcatggtcttaaacgaagcgctgcgcttatggccaactggtcctgcgttttccctatatgcaaaagaagatacggtgcttggaggagaatatcctttaaccaaaggcgacgaagtaatggttctgattcctcagcttcaccgtgataaaacaatttggggagacgatgtggaggagttccgtccagagcgttttgaaaatccaagtgcgattccgcagcatgcgtttaaaccgtttggaaacggtcagcgtgcgtgtatcggtcagcagttcgctcttcatgaagcaacgctggtacttggtatgatgctaaaacactttgactttgaagatcatacaaactacgagctcgttattggcgaacgcttaacgttaaaacctgaaggctttgtggtaaaagcaaaatcgaaaggcattccgcttggcggcattccttcacctagcactgaacagtctgctaaaaaagtacgcaaaaaggcagaaaacgctcataatacgccgctgcttgtgctatacggttcaaatgcgggaacagctgaaggaacggcgcgtgatttagcagatattgcaatgagcaaaggatttgcaccgcaggtcgcaacgcttgattcacacgccggaaatcttccgcgcgaaggagctgtattaattgtaacggcgtcttataacggtcatccgcctgataacgcaaagcaatttgtcgactggttagaccaagcgtctgctgatgaagtaaaaggcgttcgctactccgtatttggatgcggcgataaaaactgggctgcgacgtatcaaaaagtgcctgcttttatcgatgaaacgcttgccgctaaaggggcagaaaacatcgctgaccgcggtgaagcagatgcaagcgacgactttgaaggcgcgtatgaagaatggagtgatcatatgtggagtgacgtagcagcctactttaacctcgacattgaaaacagtgaagataataaatctactctttcacttcaatttgtcgacagcgccgcggatatgccgcttgcgaaaatgcacggtgcgttttcaacgaacgtcgtagcaagcaaagaacttcaacagccaggcagtgcacgaagcacgcgacatcttgaaattgaacttccaaaagaagcttcttatcaagaaggagatcatttaggtgttattcctcgcaactatgaaggaatagtaaaccgtgtaacagcaaggttcggcctaagcgcatcacagcaaatccgtctggaagcagaagaagaaaaattagctcatttgccactcgctaaaacagtatccgtagaagagcttctgcaatacgtggagcttcaagatcctgttacgcgcacgcagcttcgcgcaatggctgctaaaacggtctgcccgccgcataaagtagagcttgaagccttgcttgaaaagcaagcctacaaagaacaagtgctggcaaaacgtttaacaatgcttgaactgcttgaaaaatacccggcgtgtgaaatgaaattcagcgaatttatcgcccttctgccaagcatacgcccgcgctattactcgatttcttcatcacctcgtgtcgatgaaaaacaagcaagcatcacggtcagcgttgtctcaggaccggcgtggagcggatatggagaatataaaggaattgcgtcgaactatcttgccgagctgcaagaaggagatacgattacgtgctttatttccacagatcagtcagaatttacgctgccaaaagaccctgaaacgccgcttatcatggtcggaccgggaacaggcgtcgcgccgtttagaggctttgtgcaggcgcgcaaacagctaaaagaacaaggacagtcacttggagaagcacatttatacttcggctgccgttcacctcatgaagactatctgtatcaagaagagcttgaaaacgcccaaagcgaaggcatcattacgcttcataccgctttttctcgcatgccaaatcagccgaaaacatacgttcagcacgtaatggaacaagacggcaagaaattgattgaacttcttgatcaaggagcgcacttctatatttgcggagacggaagccaaatggcacctgccgttgaagcaacgcttatgaaaagctatgctgacgttcaccaagtgagtgaagcagacgctcgcttatggctgcagcagctagaagaaaaaggccgatacgcaaaagacgtgtgggctggg

SEQ ID NO: 326 - protein, 1049 aa, synthetic construct
  REGION 1..1049: note = Variant of cytochrome P450
MTIKEMPQPKTFGELKNLPLLNTDKPVQALMRIADELGEIFKFEAPGSVTRFLSSQRLIKEACDESRFDKNLSQSLKFARDFLGDGLFTSWTHEPNWKKAHNILGPSFSQRAMKRYHAMMVDIAVQLVQKWERLNADEHIEVSEDMTRLTLDTIGLCGFNYRFNSFYRDQPHPFIVSVVRALDEVMNKLQRANPDDPAYDENKRQCQEDIKVMNDYVDKIIADRKARGEQSHDLLTQMLNGKDPETGEPLDDGNIRYQIITFLIAGHETTSGLLSFALYFLVKNPHVLQKVAEEAARVLVDPVPSYKQVKQLKYVGMVLNEALRLWPTGPAFSLYAKEDTVLGGEYPLTKGDEVMVLIPQLHRDKTIWGDDVEEFRPERFENPSAIPQHAFKPFGNGQRACIGQQFALHEATLVLGMMLKHFDFEDHTNYELVIGERLTLKPEGFVVKAKSKGIPLGGIPSPSTEQSAKKVRKKAENAHNTPLLVLYGSNAGTAEGTARDLADIAMSKGFAPQVATLDSHAGNLPREGAVLIVTASYNGHPPDNAKQFVDWLDQASADEVKGVRYSVFGCGDKNWAATYQKVPAFIDETLAAKGAENIADRGEADASDDFEGAYEEWSDHMWSDVAAYFNLDIENSEDNKSTLSLQFVDSAADMPLAKMHGAFSTNVVASKELQQPGSARSTRHLEIELPKEASYQEGDHLGVIPRNYEGIVNRVTARFGLSASQQIRLEAEEEKLAHLPLAKTVSVEELLQYVELQDPVTRTQLRAMAAKTVCPPHKVELEALLEKQAYKEQVLAKRLTMLELLEKYPACEMKFSEFIALLPSIRPRYYSISSSPRVDEKQASITVSVVSGPAWSGYGEYKGIASNYLAELQEGDTITCFISTDQSEFTLPKDPETPLIMVGPGTGVAPFRGFVQARKQLKEQGQSLGEAHLYFGCRSPHEDYLYQEELENAQSEGIITLHTAFSRMPNQPKTYVQHVMEQDGKKLIELLDQGAHFYICGDGSQMAPAVEATLMKSYADVHQVSEADARLWLQQLEEKGRYAKDVWAG

SEQ ID NO: 327 - DNA, 3147 bp, synthetic construct
  misc_feature 1..3147: note = Variant of cytochrome P450
  source 1..3147: mol_type = other DNA
atgacaattaaggaaatgcctcagcctaagacgtttggagaacttaaaaatttaccgttattaaacacagataaaccggttcaagctttgatgcgtattgcggatgaattaggagaaatctttaaattcgaggcgcctggtagcgtaacgcgctttttatcaagtcagcgtctaattaaagaagcatgcgatgaacgtcgctttgataaaaacttaagtcaatcgctgaaatttgcccgtgattttctgggagacgggttattcacaagctggacgcatgaaccgaattggaaaaaagcgcataatatcttaggcccaagctttagtcagcgtgcaatgaaacgttatcatgcgatgatggtcgatatcgccgtgcagcttgttcaaaagtgggagcgtctaaatgcagatgagcatattgaagtatcggaagacatgacacgtttaacgctggatacaattggtctttgcggcttcaactatcgctttaacagcttttaccgagatcagcctcatccatttattgtgagtgttgtgcgtgcactggatgaagtaatgaacaagctgcagcgagcaaatccagacgacccagcttatgatgaaaacaagcgccagtttcaagaagatatcaaggtgatgaacgactatgtcgataaaattattgcagatcgcaaagcaaggggtgaacaaagccatgatttattaacgcagatgctaaacggaaaagatccagaaacgggtgagccgcttgatgacgggaacattcgttatcaaattattacattcttaatcgcgggacacgaaacaacaagtggtcttttatcatttgcgctgtatttcttagtgaaaaatccacatgtattacaaaaagtagcagaagaagcagcacgagttctagtagatcctgttccaagctacaaacaagtcaaacagcttaaatatgtcggcatggtcttaaacgaagcgctgcgcttatggccaactggtcctgcgttttccctatatgcaaaagaagatacggtgcttggaggagaatatcctttaaccaaaggcgacgaagtaatggttctgattcctcagcttcaccgtgataaaacaatttggggagacgatgtggaggagttccgtccagagcgttttgaaaatccaagtgcgattccgcagcatgcgtttaaaccgtttggaaacggtcagcgtgcgtgtatcggtcagcagttcgctcttcatgaagcaacgctggtacttggtatgatgctaaaacactttgactttgaagatcatacaaactacgagctcgttattggcgaaaaattaacgttaaaacctgaaggctttgtggtaaaagcaaaatcgaaaggcattccgcttggcggtattccttcacctagcactgaacagtctgctaaaaaagtacgcaaaaaggcagaaaacgctcataatacgccgctgcttgtgctatacggttcaaatgcgggaacagctgaaggaacggcgcgtgatttagcagatattgcaatgagcaaaggatttgcaccgcaggtcgcaacgcttgattcacacgccggaaatcttccgcgcgaaggagctgtattaattgtaacggcgtcttataacggtcatccgcctgataacgcaaagcaatttgtcgactggttagaccaagcgtctgctgatgaagtaaaaggcgttcgctactccgtatttggatgcggcgataaaaactgggctgcgacgtatcaaaaagtgcctgcttttatcgatgaaacgcttgccgctaaaggggcagaaaacatcgctgaccgcggtgaagcagatgcaagcgacgactttgaaggcgcgtatgaagaatggagtgatcatatgtggagtgacgtagcagcctactttaacctcgacattgaaaacagtgaagataataaatctactctttcacttcaatttgtcgacagcgccgcggatatgccgcttgcgaaaatgcacggtgcgttttcaacgaacgtcgtagcaagcaaagaacttcaacagccaggcagtgcacgaagcacgcgacatcttgaaattgaacttccaaaagaagcttcttatcaagaaggagatcatttaggtgttattcctcgcaactatgaaggaatagtaaaccgtgtaacagcaaggttcggcctaagcgcatcacagcaaatccgtctggaagcagaagaagaaaaattagctcatttgccactcgctaaaacagtatccgtagaagagcttctgcaatacgtggagcttcaagatcctgttacgcgcacgcagcttcgcgcaatggctgctaaaacggtctgcccgccgcataaagtagagcttgaagccttgcttgaaaagcaagcctacaaagaacaagtgctggcaaaacgtttaacaatgcttgaactgcttgaaaaatacccggcgtgtgaaatgaaattcagcgaatttatcgcccttctgccaagcatacgcccgcgctattactcgatttcttcatcacctcgtgtcgatgaaaaacaagcaagcatcacggtcagcgttgtctcaggaccggcgtggagcggatatggagaatataaaggaattgcgtcgaactatcttgccgagctgcaagaaggagatacgattacgtgctttatttccacagatcagtcagaatttacgctgccaaaagaccctgaaacgccgcttatcatggtcggaccgggaacaggcgtcgcgccgtttagaggctttgtgcaggcgcgcaaacagctaaaagaacaaggacagtcacttggagaagcacatttatacttcggctgccgttcacctcatgaagactatctgtatcaagaagagcttgaaaacgcccaaagcgaaggcatcattacgcttcataccgctttttctcgcatgccaaatcagccgaaaacatacgttcagcacgtaatggaacaagacggcaagaaattgattgaacttcttgatcaaggagcgcacttctatatttgcggagacggaagccaaatggcacctgccgttgaagcaacgcttatgaaaagctatgctgacgttcaccaagtgagtgaagcagacgctcgcttatggctgcagcagctagaagaaaaaggccgatacgcaaaagacgtgtgggctggg

SEQ ID NO: 328 - protein, 1049 aa, synthetic construct
  REGION 1..1049: note = Variant of cytochrome P450
MTIKEMPQPKTFGELKNLPLLNTDKPVQALMRIADELGEIFKFEAPGSVTRFLSSQRLIKEACDERRFDKNLSQSLKFARDFLGDGLFTSWTHEPNWKKAHNILGPSFSQRAMKRYHAMMVDIAVQLVQKWERLNADEHIEVSEDMTRLTLDTIGLCGFNYRFNSFYRDQPHPFIVSVVRALDEVMNKLQRANPDDPAYDENKRQFQEDIKVMNDYVDKIIADRKARGEQSHDLLTQMLNGKDPETGEPLDDGNIRYQIITFLIAGHETTSGLLSFALYFLVKNPHVLQKVAEEAARVLVDPVPSYKQVKQLKYVGMVLNEALRLWPTGPAFSLYAKEDTVLGGEYPLTKGDEVMVLIPQLHRDKTIWGDDVEEFRPERFENPSAIPQHAFKPFGNGQRACIGQQFALHEATLVLGMMLKHFDFEDHTNYELVIGEKLTLKPEGFVVKAKSKGIPLGGIPSPSTEQSAKKVRKKAENAHNTPLLVLYGSNAGTAEGTARDLADIAMSKGFAPQVATLDSHAGNLPREGAVLIVTASYNGHPPDNAKQFVDWLDQASADEVKGVRYSVFGCGDKNWAATYQKVPAFIDETLAAKGAENIADRGEADASDDFEGAYEEWSDHMWSDVAAYFNLDIENSEDNKSTLSLQFVDSAADMPLAKMHGAFSTNVVASKELQQPGSARSTRHLEIELPKEASYQEGDHLGVIPRNYEGIVNRVTARFGLSASQQIRLEAEEEKLAHLPLAKTVSVEELLQYVELQDPVTRTQLRAMAAKTVCPPHKVELEALLEKQAYKEQVLAKRLTMLELLEKYPACEMKFSEFIALLPSIRPRYYSISSSPRVDEKQASITVSVVSGPAWSGYGEYKGIASNYLAELQEGDTITCFISTDQSEFTLPKDPETPLIMVGPGTGVAPFRGFVQARKQLKEQGQSLGEAHLYFGCRSPHEDYLYQEELENAQSEGIITLHTAFSRMPNQPKTYVQHVMEQDGKKLIELLDQGAHFYICGDGSQMAPAVEATLMKSYADVHQVSEADARLWLQQLEEKGRYAKDVWAG

SEQ ID NO: 329 - DNA, 3147 bp, synthetic construct
  misc_feature 1..3147: note = Variant of cytochrome P450
  source 1..3147: mol_type = other DNA
atgacaattaaggaaatgcctcagcctaagacgtttggagaacttaaaaatttaccgttattaaacacagataaaccggttcaagctttgatgcgtattgcggatgaattaggagaaatctttaaattcgaggcgcctggtagcgtaacgcgctttttatcaagtcagcgtctaattaaagaagcatgcgatgaatcacgctttgataaaaacttaagtcaatcgctgaaatttgcccgtgattttctgggagacgggttatttacaagctggacgcatgaaccgaattggaaaaaagcgcataatatcttaggcccaagctttagtcagcgtgcaatgaaacgttatcatgcgatgatggtcgatatcgccgtgcagcttgttcaaaagtgggagcgtctaaatgcagatgagcatattgaagtatcggaagacatgacacgtttaacgctggatacaattggtctttgcggcttcaactatcgctttaacagcttttaccgagatcagcctcatccatttattgtggcggtagtgcgtgcactggatgaagtaatgaacaagctgcagcgagcaaatccagacgacccagcttatgatgaaaacaagcgccagtttcaagaagatatcaaggtgatgaacgactatgtcgataaaattattgcagatcgcaaagcaaggggtgaacaaagccatgatttattaacgcagatgctaaacggaaaagatccagaaacgggtgagccgcttgatgacgggaacattcgttatcaaattattacattcttaatcgcgggacacgaaacaacaagtggtcttttatcatttgcgctgtatttcttagtgaaaaatccacatgtattacaaaaagtagcagaagaagcagcacgagttctagtagatcctgttccaagctacaaacaagtcaaacagcttaaatatgtcggcatggtcttaaacgaagcgctgcgcttatggccaactggtcctgcgttttccctatatgcaaaagaagatacggtgcttggaggagaatatcctttaaccaaaggcgacgaagtaatggttctgattcctcagcttcaccgtgataaaacaatttggggagacgatgtggaggagttccgtccagagcgttttgaaaatccaagtgcgattccgcagcatgcgtttaaaccgtttggaaacggtcagcgtgcgtgtatcggtcagcagttcgctcttcatgaagcaacgctggtacttggtatgatgctaaaacactttgactttgaagatcatacaaactacgagctcgttattaaggaacgcttaacgttaaaacctgaaggctttgtggtaaaagcaaaatcgaaaggcattccgcttggcctgattccttcacctagcactgaacagtctgctaaaaaagtacgcaaaaaggcagaaaacgctcataatacgccgctgcttgtgctatacggttcaaatgcgggaacagctgaaggaacggcgcgtgatttagcagatattgcaatgagcaaaggatttgcaccgcaggtcgcaacgcttgattcacacgccggaaatcttccgcgcgaaggagctgtattaattgtaacggcgtcttataacggtcatccgcctgataacgcaaagcaatttgtcgactggttagaccaagcgtctgctgatgaagtaaaaggcgttcgctactccgtatttggatgcggcgataaaaactgggctgcgacgtatcaaaaagtgcctgcttttatcgatgaaacgcttgccgctaaaggggcagaaaacatcgctgaccgcggtgaagcagatgcaagcgacgactttgaaggcgcgtatgaagaatggagtgatcatatgtggagtgacgtagcagcctactttaacctcgacattgaaaacagtgaagataataaatctactctttcacttcaatttgtcgacagcgccgcggatatgccgcttgcgaaaatgcacggtgcgttttcaacgaacgtcgtagcaagcaaagaacttcaacagccaggcagtgcacgaagcacgcgacatcttgaaattgaacttccaaaagaagcttcttatcaagaaggagatcatttaggtgttattcctcgcaactatgaaggaatagtaaaccgtgtaacagcaaggttcggcctaagcgcatcacagcaaatccgtctggaagcagaagaagaaaaattagctcatttgccactcgctaaaacagtatccgtagaagagcttctgcaatacgtggagcttcaagatcctgttacgcgcacgcagcttcgcgcaatggctgctaaaacggtctgcccgccgcataaagtagagcttgaagccttgcttgaaaagcaagcctacaaagaacaagtgctggcaaaacgtttaacaatgcttgaactgcttgaaaaatacccggcgtgtgaaatgaaattcagcgaatttatcgcccttctgccaagcatacgcccgcgctattactcgatttcttcatcacctcgtgtcgatgaaaaacaagcaagcatcacggtcagcgttgtctcaggaccggcgtggagcggatatggagaatataaaggaattgcgtcgaactatcttgccgagctgcaagaaggagatacgattacgtgctttatttccacagatcagtcagaatttacgctgccaaaagaccctgaaacgccgcttatcatggtcggaccgggaacaggcgtcgcgccgtttagaggctttgtgcaggcgcgcaaacagctaaaagaacaaggacagtcacttggagaagcacatttatacttcggctgccgttcacctcatgaagactatctgtatcaagaagagcttgaaaacgcccaaagcgaaggcatcattacgcttcataccgctttttctcgcatgccaaatcagccgaaaacatacgttcagcacgtaatggaacaagacggcaagaaattgattgaacttcttgatcaaggagcgcacttctatatttgcggagacggaagccaaatggcacctgccgttgaagcaacgcttatgaaaagctatgctgacgttcaccaagtgagtgaagcagacgctcgcttatggctgcagcagctagaagaaaaaggccgatacgcaaaagacgtgtgggctggg

SEQ ID NO: 330 - protein, 1049 aa, synthetic construct
  REGION 1..1049: note = Variant of cytochrome P450
MTIKEMPQPKTFGELKNLPLLNTDKPVQALMRIADELGEIFKFEAPGSVTRFLSSQRLIKEACDESRFDKNLSQSLKFARDFLGDGLFTSWTHEPNWKKAHNILGPSFSQRAMKRYHAMMVDIAVQLVQKWERLNADEHIEVSEDMTRLTLDTIGLCGFNYRFNSFYRDQPHPFIVAVVRALDEVMNKLQRANPDDPAYDENKRQFQEDIKVMNDYVDKIIADRKARGEQSHDLLTQMLNGKDPETGEPLDDGNIRYQIITFLIAGHETTSGLLSFALYFLVKNPHVLQKVAEEAARVLVDPVPSYKQVKQLKYVGMVLNEALRLWPTGPAFSLYAKEDTVLGGEYPLTKGDEVMVLIPQLHRDKTIWGDDVEEFRPERFENPSAIPQHAFKPFGNGQRACIGQQFALHEATLVLGMMLKHFDFEDHTNYELVIKERLTLKPEGFVVKAKSKGIPLGLIPSPSTEQSAKKVRKKAENAHNTPLLVLYGSNAGTAEGTARDLADIAMSKGFAPQVATLDSHAGNLPREGAVLIVTASYNGHPPDNAKQFVDWLDQASADEVKGVRYSVFGCGDKNWAATYQKVPAFIDETLAAKGAENIADRGEADASDDFEGAYEEWSDHMWSDVAAYFNLDIENSEDNKSTLSLQFVDSAADMPLAKMHGAFSTNVVASKELQQPGSARSTRHLEIELPKEASYQEGDHLGVIPRNYEGIVNRVTARFGLSASQQIRLEAEEEKLAHLPLAKTVSVEELLQYVELQDPVTRTQLRAMAAKTVCPPHKVELEALLEKQAYKEQVLAKRLTMLELLEKYPACEMKFSEFIALLPSIRPRYYSISSSPRVDEKQASITVSVVSGPAWSGYGEYKGIASNYLAELQEGDTITCFISTDQSEFTLPKDPETPLIMVGPGTGVAPFRGFVQARKQLKEQGQSLGEAHLYFGCRSPHEDYLYQEELENAQSEGIITLHTAFSRMPNQPKTYVQHVMEQDGKKLIELLDQGAHFYICGDGSQMAPAVEATLMKSYADVHQVSEADARLWLQQLEEKGRYAKDVWAG

SEQ ID NO: 331 - DNA, 3147 bp, synthetic construct
  misc_feature 1..3147: note = Variant of cytochrome P450
  source 1..3147: mol_type = other DNA
atgacaattaaggaaatgcctcagcctaagacgtttggagaacttaaaaatttaccgttattaaacacagataaaccggttcaagctttgatgcgtattgcggatgaattaggagaaatctttaaattcgaggcgcctggtagcgtaacgcgctttttatcaagtcagcgtctaattaaagaagcatgcgatgaaagtcgctttgataaaaacttaagtcaatcgctgaaatttgcccgtgattttctgggagacgggttatttacaagctggacgcatgaaccgaattggaaaaaagcgcataatatcttaggcccaagctttagtcagcgtgcaatgaaacgttatcatgcgatgatggtcgatatcgccgtgcagcttgttcaaaagtgggagcgtctaaatgcagatgagcatattgaagtatcggaagacatgacacgtttaacgctggatacaattggtctttgcggcttcaactatcgctttaacagcttttaccgagatcagcctcatccatttattgtgagtgttgtgcgtgcactggatgaagtaatgaacaagctgcagcgagcaaatccagacgacccagcttatgatgaaaacaagcgccagtgtcaagaagatatcaaggtgatgaacgactatgtcgataaaattattgcagatcgcaaagcaaggggtgaacaaagccatgatttattaacgcagatgctaaacggaaaagatccagaaacgggtgagccgcttgatgacgggaacattcgttatcaaattattacattcttaatcgcgggacacgaaacaacaagtggtcttttatcatttgcgctgtatttcttagtgaaaaatccacatgtattacaaaaagtagcagaagaagcagcacgagttctagtagatcctgttccaagctacaaacaagtcaaacagcttaaatatgtcggcatggtcttaaacgaagcgctgcgcttatggccaactggtcctgcgttttccctatatgcaaaagaagatacggtgcttggaggagaatatcctttaaccaaaggcgacgaagtaatggttctgattcctcagcttcaccgtgataaaacaatttggggagacgatgtggaggagttccgtccagagcgttttgaaaatccaagtgcgattccgcagcatgcgtttaaaccgtttggaaacggtcagcgtgcgtgtatcggtcagcagttcgctcttcatgaagcaacgctggtacttggtatgatgctaaaacactttgactttgaagatcatacaaactacgagctcgttattaaggaacgcttaacgttaaaacctgaaggctttgtggtaaaagcaaaatcgaaaggcattccgcttggcggtattccttcacctagcactgaacagtctgctaaaaaagtacgcaaaaaggcagaaaacgctcataatacgccgctgcttgtgctatacggttcaaatgcgggaacagctgaaggaacggcgcgtgatttagcagatattgcaatgagcaaaggatttgcaccgcaggtcgcaacgcttgattcacacgccggaaatcttccgcgcgaaggagctgtattaattgtaacggcgtcttataacggtcatccgcctgataacgcaaagcaatttgtcgactggttagaccaagcgtctgctgatgaagtaaaaggcgttcgctactccgtatttggatgcggcgataaaaactgggctgcgacgtatcaaaaagtgcctgcttttatcgatgaaacgcttgccgctaaaggggcagaaaacatcgctgaccgcggtgaagcagatgcaagcgacgactttgaaggcacgtatgaagaatggagtgatcatatgtggagtgacgtagcagcctactttaacctcgacattgaaaacagtgaagataataaatctactctttcacttcaatttgtcgacagcgccgcggatatgccgcttgcgaaaatgcacggtgcgttttcaacgaacgtcgtagcaagcaaagaacttcaacagccaggcagtgcacgaagcacgcgacatcttgaaattgaacttccaaaagaagcttcttatcaagaaggagatcatttaggtgttattcctcgcaactatgaaggaatagtaaaccgtgtaacagcaaggttcggcctaagcgcatcacagcaaatccgtctggaagcagaagaagaaaaattagctcatttgccactcgctaaaacagtatccgtagaagagcttctgcaatacgtggagcttcaagatcctgttacgcgcacgcagcttcgcgcaatggctgctaaaacggtctgcccgccgcataaagtagagcttgaagccttgcttgaaaagcaagcctacaaagaacaagtgctggcaaaacgtttaacaatgcttgaactgcttgaaaaatacccggcgtgtgaaatgaaattcagcgaatttatcgcccttctgccaagcatacgcccgcgctattactcgatttcttcatcacctcgtgtcgatgaaaaacaagcaagcatcacggtcagcgttgtctcaggaccggcgtggagcggatatggagaatataaaggaattgcgtcgaactatcttgccgagctgcaagaaggagatacgattacgtgctttatttccacagatcagtcagaatttacgctgccaaaagaccctgaaacgccgcttatcatggtcggaccgggaacaggcgtcgcgccgtttagaggctttgtgcaggcgcgcaaacagctaaaagaacaaggacagtcacttggagaagcacatttatacttcggctgccgttcacctcatgaagactatctgtatcaagaagagcttgaaaacgcccaaagcgaaggcatcattacgcttcataccgctttttctcgcatgccaaatcagccgaaaacatacgttcagcacgtaatggaacaagacggcaagaaattgattgaacttcttgatcaaggagcgcacttctatatttgcggagacggaagccaaatggcacctgccgttgaagcaacgcttatgaaaagctatgctgacgttcaccaagtgagtgaagcagacgctcgcttatggctgcagcagctagaagaaaaaggccgatacgcaaaagacgtgtgggctggg

SEQ ID NO: 332 - protein, 1049 aa, synthetic construct
  REGION 1..1049: note = Variant of cytochrome P450
MTIKEMPQPKTFGELKNLPLLNTDKPVQALMRIADELGEIFKFEAPGSVTRFLSSQRLIKEACDESRFDKNLSQSLKFARDFLGDGLFTSWTHEPNWKKAHNILGPSFSQRAMKRYHAMMVDIAVQLVQKWERLNADEHIEVSEDMTRLTLDTIGLCGFNYRFNSFYRDQPHPFIVSVVRALDEVMNKLQRANPDDPAYDENKRQCQEDIKVMNDYVDKIIADRKARGEQSHDLLTQMLNGKDPETGEPLDDGNIRYQIITFLIAGHETTSGLLSFALYFLVKNPHVLQKVAEEAARVLVDPVPSYKQVKQLKYVGMVLNEALRLWPTGPAFSLYAKEDTVLGGEYPLTKGDEVMVLIPQLHRDKTIWGDDVEEFRPERFENPSAIPQHAFKPFGNGQRACIGQQFALHEATLVLGMMLKHFDFEDHTNYELVIKERLTLKPEGFVVKAKSKGIPLGGIPSPSTEQSAKKVRKKAENAHNTPLLVLYGSNAGTAEGTARDLADIAMSKGFAPQVATLDSHAGNLPREGAVLIVTASYNGHPPDNAKQFVDWLDQASADEVKGVRYSVFGCGDKNWAATYQKVPAFIDETLAAKGAENIADRGEADASDDFEGTYEEWSDHMWSDVAAYFNLDIENSEDNKSTLSLQFVDSAADMPLAKMHGAFSTNVVASKELQQPGSARSTRHLEIELPKEASYQEGDHLGVIPRNYEGIVNRVTARFGLSASQQIRLEAEEEKLAHLPLAKTVSVEELLQYVELQDPVTRTQLRAMAAKTVCPPHKVELEALLEKQAYKEQVLAKRLTMLELLEKYPACEMKFSEFIALLPSIRPRYYSISSSPRVDEKQASITVSVVSGPAWSGYGEYKGIASNYLAELQEGDTITCFISTDQSEFTLPKDPETPLIMVGPGTGVAPFRGFVQARKQLKEQGQSLGEAHLYFGCRSPHEDYLYQEELENAQSEGIITLHTAFSRMPNQPKTYVQHVMEQDGKKLIELLDQGAHFYICGDGSQMAPAVEATLMKSYADVHQVSEADARLWLQQLEEKGRYAKDVWAG

SEQ ID NO: 333 - DNA, 3147 bp, synthetic construct
  misc_feature 1..3147: note = Variant of cytochrome P450
  source 1..3147: mol_type = other DNA
atgacaattaaggaaatgcctcagcctaagacgtttggagaacttaaaaatttaccgttattaaacacagataaaccggttcaagctttgatgcgtattgcggatgaattaggagaaatctttaaattcgaggcgcctggtagcgtaacgcgctttttatcaagtcagcgtctaattaaagaagcatgcgatgaaagtcgctttgataaaaacttaagtcaatcgctgaaatttgcccgtgattttctgggagacgggttatttacaagctggacgcatgaaccgaattggaaaaaagcgcataatatcttaggcccaagctttagtcagcgtgcaatgaaacgttatcatgcgatgatggtcgatatcgccgtgcagcttgttcaaaagtgggagcgtctaaatgcagatgagcatattgaagtatcggaagacatgacacgtttaacgctggatacaattggtctttgcggcttcaactatcgctttaacagcttttaccgagatcagcctcatccatttattgtgagtgttgtgcgtgcactggatgaagtaatgaacaagctgcagcgagcaaatccagacgacccagcttatgatgaaaacaagcgccagtttcaagaagatatcaaggtgatgaacgactatgtcgataaaattattgcagatcgcaaagcaaggggtgaacaaagccatgatttattaacgcagatgctaaacggaaaagatccagaaacgggtgagccgcttgatgacgggaacattcgttatcaaattattacattcttaatcgcgggacacgaaacaacaagtggtcttttatcatttgcgctgtatttcttagtgaaaaatccacatgtattacaaaaagtagcagaagaagcagcacgagttctagtagatcctgttccaagctacaaacaagtcaaacagcttaaatatgtcggcatggtcttaaacgaagcgctgcgcttatggccaactggtcctgcgttttccctatatgcaaaagaagatacggtgcttggaggagaatatcctttaaccaaaggcgacgaagtaatggttctgattcctcagcttcaccgtgataaaacaatttggggagacgatgtggaggagttccgtccagagcgttttgaaaatccaagtgcgattccgcagcatgcgtttaaaccgtttggaaacggtcagcgtgcgtgtatcggtcagcagttcgctcttcatgaagcaacgctggtacttggtatgatgctaaaacactttgactttgaagatcatacaaactacgagctcgttattaaggaaaaattaacgttaaaacctgaaggctttgtggtaaaagcaaaatcgaaaggcattccgcttggcggtattccttcacctagcactgaacagtctgctaaaaaagtacgcaaaaaggcagaaaacgctcataatacgccgctgcttgtgctatacggttcaaatgcgggaacagctgaaggaacggcgcgtgatttagcagatattgcaatgagcaaaggatttgcaccgcaggtcgcaacgcttgattcacacgccggaaatcttccgcgcgaaggagctgtattaattgtaacggcgtcttataacggtcatccgcctgataacgcaaagcaatttgtcgactggttagaccaagcgtctgctgatgaagtaaaaggcgttcgctactccgtatttggatgcggcgataaaaactgggctgcgacgtatcaaaaagtgcctgcttttatcgatgaaacgcttgccgctaaaggggcagaaaacatcgctgaccgcggtgaagcagatgcaagcgacgactttgaaggcacgtatgaagaatggagtgatcatatgtggagtgacgtagcagcctactttaacctcgacattgaaaacagtgaagataataaatctactctttcacttcaatttgtcgacagcgccgcggatatgccgcttgcgaaaatgcacggtgcgttttcaacgaacgtcgtagcaagcaaagaacttcaacagccaggcagtgcacgaagcacgcgacatcttgaaattgaacttccaaaagaagcttcttatcaagaaggagatcatttaggtgttattcctcgcaactatgaaggaatagtaaaccgtgtaacagcaaggttcggcctaagcgcatcacagcaaatccgtctggaagcagaagaagaaaaattagctcatttgccactcgctaaaacagtatccgtagaagagcttctgcaatacgtggagcttcaagatcctgttacgcgcacgcagcttcgcgcaatggctgctaaaacggtctgcccgccgcataaagtagagcttgaagccttgcttgaaaagcaagcctacaaagaacaagtgctggcaaaacgtttaacaatgcttgaactgcttgaaaaatacccggcgtgtgaaatgaaattcagcgaatttatcgcccttctgccaagcatacgcccgcgctattactcgatttcttcatcacctcgtgtcgatgaaaaacaagcaagcatcacggtcagcgttgtctcaggaccggcgtggagcggatatggagaatataaaggaattgcgtcgaactatcttgccgagctgcaagaaggagatacgattacgtgctttatttccacagatcagtcagaatttacgctgccaaaagaccctgaaacgccgcttatcatggtcggaccgggaacaggcgtcgcgccgtttagaggctttgtgcaggcgcgcaaacagctaaaagaacaaggacagtcacttggagaagcacatttatacttcggctgccgttcacctcatgaagactatctgtatcaagaagagcttgaaaacgcccaaagcgaaggcatcattacgcttcataccgctttttctcgcatgccaaatcagccgaaaacatacgttcagcacgtaatggaacaagacggcaagaaattgattgaacttcttgatcaaggagcgcacttctatatttgcggagacggaagccaaatggcacctgccgttgaagcaacgcttatgaaaagctatgctgacgttcaccaagtgagtgaagcagacgctcgcttatggctgcagcagctagaagaaaaaggccgatacgcaaaagacgtgtgggctggg

SEQ ID NO: 334 - protein, 1049 aa, synthetic construct
  REGION 1..1049: note = Variant of cytochrome P450
MTIKEMPQPKTFGELKNLPLLNTDKPVQALMRIADELGEIFKFEAPGSVTRFLSSQRLIKEACDESRFDKNLSQSLKFARDFLGDGLFTSWTHEPNWKKAHNILGPSFSQRAMKRYHAMMVDIAVQLVQKWERLNADEHIEVSEDMTRLTLDTIGLCGFNYRFNSFYRDQPHPFIVSVVRALDEVMNKLQRANPDDPAYDENKRQFQEDIKVMNDYVDKIIADRKARGEQSHDLLTQMLNGKDPETGEPLDDGNIRYQIITFLIAGHETTSGLLSFALYFLVKNPHVLQKVAEEAARVLVDPVPSYKQVKQLKYVGMVLNEALRLWPTGPAFSLYAKEDTVLGGEYPLTKGDEVMVLIPQLHRDKTIWGDDVEEFRPERFENPSAIPQHAFKPFGNGQRACIGQQFALHEATLVLGMMLKHFDFEDHTNYELVIKEKLTLKPEGFVVKAKSKGIPLGGIPSPSTEQSAKKVRKKAENAHNTPLLVLYGSNAGTAEGTARDLADIAMSKGFAPQVATLDSHAGNLPREGAVLIVTASYNGHPPDNAKQFVDWLDQASADEVKGVRYSVFGCGDKNWAATYQKVPAFIDETLAAKGAENIADRGEADASDDFEGTYEEWSDHMWSDVAAYFNLDIENSEDNKSTLSLQFVDSAADMPLAKMHGAFSTNVVASKELQQPGSARSTRHLEIELPKEASYQEGDHLGVIPRNYEGIVNRVTARFGLSASQQIRLEAEEEKLAHLPLAKTVSVEELLQYVELQDPVTRTQLRAMAAKTVCPPHKVELEALLEKQAYKEQVLAKRLTMLELLEKYPACEMKFSEFIALLPSIRPRYYSISSSPRVDEKQASITVSVVSGPAWSGYGEYKGIASNYLAELQEGDTITCFISTDQSEFTLPKDPETPLIMVGPGTGVAPFRGFVQARKQLKEQGQSLGEAHLYFGCRSPHEDYLYQEELENAQSEGIITLHTAFSRMPNQPKTYVQHVMEQDGKKLIELLDQGAHFYICGDGSQMAPAVEATLMKSYADVHQVSEADARLWLQQLEEKGRYAKDVWAG

SEQ ID NO: 335 - DNA, 3147 bp, synthetic construct
  misc_feature 1..3147: note = Variant of cytochrome P450
  source 1..3147: mol_type = other DNA
atgacaattaaggaaatgcctcagcctaagacgtttggagaacttaaaaatttaccgttattaaacacagataaaccggttcaagctttgatgcgtattgcggatgaattaggagaaatctttaaattcgaggcgcctggtagcgtaacgcgctttttatcaagtcagcgtctaattaaagaagcatgcgatgaatcacgctttgataaaaacttaagtcaatcgctgaaatttgggcgtgattttctgggagacgggttatttacaagctggacgcatgaaccgaattggaaaaaagcgcataatatcttaggcccaagctttagtcagcgtgcaatgaaacgttatcatgcgatgatggtcgatatcgccgtgcagcttgttcaaaagtgggagcgtctaaatgcagatgagcatattgaagtatcggaagacatgacacgtttaacgctggatacaattggtctttgcggcttcaactatcgctttaacagcttttaccgagatcagcctcatccatttattgtgagtgttgtgcgtctgctggatgaaatcatgaacaagctgcagcgagcaaatccagacgacccagcttatgatgaaaacaagcgccagtgtcaagaagatatcaaggtgatgaacgactatgtcgataaaattattgcagatcgcaaagcaaggggtgaacaaagccatgatttattaacgcagatgctaaacggaaaagatccagaaacgggtgagccgcttgatgacgggaacattcgttatcaaattattacattcttaatcgcgggacacgaaacaacaagtggtcttttatcatttgcgctgtatttcttagtgaaaaatccacatgtattacaaaaagtagcagaagaagcagcacgagttctagtagatcctgttccaagctacaaacaagtcaaacagcttaaatatgtcggcatggtcttaaacgaagcgctgcgcttatggccaactggtcctgcgttttccctatatgcaaaagaagatacggtgcttggaggagaatatcctttaaccaaaggcgacgaagtaatggttctgattcctcagcttcaccgtgataaaacaatttggggagacgatgtggaggagttccgtccagagcgttttgaaaatccaagtgcgattccgcagcatgcgtttaaaccgtttggaaacggtcagcgtgcgtgtatcggtcagcagttcgctcttcatgaagcaacgctggtacttggtatgatgctaaaacactttgactttgaagatcatacaaactacgagctcgttattaaggaacgcttaacgttaaaacctgaaggctttgtggtaaaagcaaaatcgaaaggcattccgcttggcctgattccttcacctagcactgaacagtctgctaaaaaagtacgcaaaaaggcagaaaacgctcataatacgccgctgcttgtgctatacggttcaaatgcgggaacagctgaaggaacggcgcgtgatttagcagatattgcaatgagcaaaggatttgcaccgcaggtcgcaacgcttgattcacacgccggaaatcttccgcgcgaaggagctgtattaattgtaacggcgtcttataacggtcatccgcctgataacgcaaagcaatttgtcgactggttagaccaagcgtctgctgatgaagtaaaaggcgttcgctactccgtatttggatgcggcgataaaaactgggctgcgacgtatcaaaaagtgcctgcttttatcgatgaaacgcttgccgctaaaggggcagaaaacatcgctgaccgcggtgaagcagatgcaagcgacgactttgaaggcacgtatgaagaatggagtgatcatatgtggagtgacgtagcagcctactttaacctcgacattgaaaacagtgaagataataaatctactctttcacttcaatttgtcgacagcgccgcggatatgccgcttgcgaaaatgcacggtgcgttttcaacgaacgtcgtagcaagcaaagaacttcaacagccaggcagtgcacgaagcacgcgacatcttgaaattgaacttccaaaagaagcttcttatcaagaaggagatcatttaggtgttattcctcgcaactatgaaggaatagtaaaccgtgtaacagcaaggttcggcctaagcgcatcacagcaaatccgtctggaagcagaagaagaaaaattagctcatttgccactcgctaaaacagtatccgtagaagagcttctgcaatacgtggagcttcaagatcctgttacgcgcacgcagcttcgcgcaatggctgctaaaacggtctgcccgccgcataaagtagagcttgaagccttgcttgaaaagcaagcctacaaagaacaagtgctggcaaaacgtttaacaatgcttgaactgcttgaaaaatacccggcgtgtgaaatgaaattcagcgaatttatcgcccttctgccaagcatacgcccgcgctattactcgatttcttcatcacctcgtgtcgatgaaaaacaagcaagcatcacggtcagcgttgtctcaggaccggcgtggagcggatatggagaatataaaggaattgcgtcgaactatcttgccgagctgcaagaaggagatacgattacgtgctttatttccacagatcagtcagaatttacgctgccaaaagaccctgaaacgccgcttatcatggtcggaccgggaacaggcgtcgcgccgtttagaggctttgtgcaggcgcgcaaacagctaaaagaacaaggacagtcacttggagaagcacatttatacttcggctgccgttcacctcatgaagactatctgtatcaagaagagcttgaaaacgcccaaagcgaaggcatcattacgcttcataccgctttttctcgcatgccaaatcagccgaaaacatacgttcagcacgtaatggaacaagacggcaagaaattgattgaacttcttgatcaaggagcgcacttctatatttgcggagacggaagccaaatggcacctgccgttgaagcaacgcttatgaaaagctatgctgacgttcaccaagtgagtgaagcagacgctcgcttatggctgcagcagctagaagaaaaaggccgatacgcaaaagacgtgtgggctggg

SEQ ID NO: 336 - protein, 1049 aa, synthetic construct
  REGION 1..1049: note = Variant of cytochrome P450
MTIKEMPQPKTFGELKNLPLLNTDKPVQALMRIADELGEIFKFEAPGSVTRFLSSQRLIKEACDESRFDKNLSQSLKFGRDFLGDGLFTSWTHEPNWKKAHNILGPSFSQRAMKRYHAMMVDIAVQLVQKWERLNADEHIEVSEDMTRLTLDTIGLCGFNYRFNSFYRDQPHPFIVSVVRLLDEIMNKLQRANPDDPAYDENKRQCQEDIKVMNDYVDKIIADRKARGEQSHDLLTQMLNGKDPETGEPLDDGNIRYQIITFLIAGHETTSGLLSFALYFLVKNPHVLQKVAEEAARVLVDPVPSYKQVKQLKYVGMVLNEALRLWPTGPAFSLYAKEDTVLGGEYPLTKGDEVMVLIPQLHRDKTIWGDDVEEFRPERFENPSAIPQHAFKPFGNGQRACIGQQFALHEATLVLGMMLKHFDFEDHTNYELVIKERLTLKPEGFVVKAKSKGIPLGLIPSPSTEQSAKKVRKKAENAHNTPLLVLYGSNAGTAEGTARDLADIAMSKGFAPQVATLDSHAGNLPREGAVLIVTASYNGHPPDNAKQFVDWLDQASADEVKGVRYSVFGCGDKNWAATYQKVPAFIDETLAAKGAENIADRGEADASDDFEGTYEEWSDHMWSDVAAYFNLDIENSEDNKSTLSLQFVDSAADMPLAKMHGAFSTNVVASKELQQPGSARSTRHLEIELPKEASYQEGDHLGVIPRNYEGIVNRVTARFGLSASQQIRLEAEEEKLAHLPLAKTVSVEELLQYVELQDPVTRTQLRAMAAKTVCPPHKVELEALLEKQAYKEQVLAKRLTMLELLEKYPACEMKFSEFIALLPSIRPRYYSISSSPRVDEKQASITVSVVSGPAWSGYGEYKGIASNYLAELQEGDTITCFISTDQSEFTLPKDPETPLIMVGPGTGVAPFRGFVQARKQLKEQGQSLGEAHLYFGCRSPHEDYLYQEELENAQSEGIITLHTAFSRMPNQPKTYVQHVMEQDGKKLIELLDQGAHFYICGDGSQMAPAVEATLMKSYADVHQVSEADARLWLQQLEEKGRYAKDVWAG

SEQ ID NO: 337 - DNA, 3147 bp, synthetic construct
  misc_feature 1..3147: note = Variant of cytochrome P450
  source 1..3147: mol_type = other DNA
atgacaattaaggaaatgcctcagcctaagacgtttggagaacttaaaaatttaccgttattaaacacagataaaccggttcaagctttgatgcgtattgcggatgaattaggagaaatctttaaattcgaggcgcctggtagcgtaacgcgctttttatcaagtcagcgtctaattaaagaagcatgcgatgaatcacgctttgataaaaacttaagtcaatcgctgaaatttgcccgtgattttctgggagacgggttatttacaagctggacgcatgaaccgaattggaaaaaagcgcataatatcttaggcccaagctttagtcagcgtgcaatgaaacgttatcatgcgatgatggtcgatatcgccgtgcagcttgttcaaaagtgggagcgtctaaatgcagatgagcatattgaagtatcggaagacatgacacgtttaacgctggatacaattggtctttgcggcttcaactatcgctttaacagcttttaccgagatcagcctcatccatttattgtgagtgttgtgcgtgcactggatgaagtaatgaacaagctgcagcgagcaaatccagacgacccagcttatgatgaaaacaagcgccagtgtcaagaagatatcaaggtgatgaacgactatgtcgataaaattattgcagatcgcaaagcaaggggtgaacaaagccatgatttattaacgcagatgctaaacggaaaagatccagaaacgggtgagccgcttgatgacgggaacattcgttatcaaattattacattcttaatcgcgggacacgaaacaacaagtggtcttttatcatttgcgctgtatttcttagtgaaaaatccacatgtattacaaaaagtagcagaagaagcagcacgagttctagtagatcctgttccaagctacaaacaagtcaaacagcttaaatatgtcggcatggtcttaaacgaagcgctgcgcttatggccaactggtcctgcgttttccctatatgcaaaagaagatacggtgcttggaggagaatatcctttaaccaaaggcgacgaagtaatggttctgattcctcagcttcaccgtgataaaacaatttggggagacgatgtggaggagttccgtccagagcgttttgaaaatccaagtgcgattccgcagcatgcgtttaaaccgtttggaaacggtcagcgtgcgtgtatcggtcagcagttcgctcttcatgaagcaacgctggtacttggtatgatgctaaaacactttgactttgaagatcatacaaactacgagctcgttattaaagaaaagttaacgttaaaacctgaaggctttgtggtaaaagcaaaatcgaaaggcattccgcttggcctgattccttcacctagcactgaacagtctgctaaaaaagtacgcaaaaaggcagaaaacgctcataatacgccgctgcttgtgctatacggttcaaatgcgggaacagctgaaggaacggcgcgtgatttagcagatattgcaatgagcaaaggatttgcaccgcaggtcgcaacgcttgattcacacgccggaaatcttccgcgcgaaggagctgtattaattgtaacggcgtcttataacggtcatccgcctgataacgcaaagcaatttgtcgactggttagaccaagcgtctgctgatgaagtaaaaggcgttcgctactccgtatttggatgcggcgataaaaactgggctgcgacgtatcaaaaagtgcctgcttttatcgatgaaacgcttgccgctaaaggggcagaaaacatcgctgaccgcggtgaagcagatgcaagcgacgactttgaaggcacgtatgaagaatggagtgatcatatgtggagtgacgtagcagcctactttaacctcgacattgaaaacagtgaagataataaatctactctttcacttcaatttgtcgacagcgccgcggatatgccgcttgcgaaaatgcacggtgcgttttcaacgaacgtcgtagcaagcaaagaacttcaacagccaggcagtgcacgaagcacgcgacatcttgaaattgaacttccaaaagaagcttcttatcaagaaggagatcatttaggtgttattcctcgcaactatgaaggaatagtaaaccgtgtaacagcaaggttcggcctaagcgcatcacagcaaatccgtctggaagcagaagaagaaaaattagctcatttgccactcgctaaaacagtatccgtagaagagcttctgcaatacgtggagcttcaagatcctgttacgcgcacgcagcttcgcgcaatggctgctaaaacggtctgcccgccgcataaagtagagcttgaagccttgcttgaaaagcaagcctacaaagaacaagtgctggcaaaacgtttaacaatgcttgaactgcttgaaaaatacccggcgtgtgaaatgaaattcagcgaatttatcgcccttctgccaagcatacgcccgcgctattactcgatttcttcatcacctcgtgtcgatgaaaaacaagcaagcatcacggtcagcgttgtctcaggaccggcgtggagcggatatggagaatataaaggaattgcgtcgaactatcttgccgagctgcaagaaggagatacgattacgtgctttatttccacagatcagtcagaatttacgctgccaaaagaccctgaaacgccgcttatcatggtcggaccgggaacaggcgtcgcgccgtttagaggctttgtgcaggcgcgcaaacagctaaaagaacaaggacagtcacttggagaagcacatttatacttcggctgccgttcacctcatgaagactatctgtatcaagaagagcttgaaaacgcccaaagcgaaggcatcattacgcttcataccgctttttctcgcatgccaaatcagccgaaaacatacgttcagcacgtaatggaacaagacggcaagaaattgattgaacttcttgatcaaggagcgcacttctatatttgcggagacggaagccaaatggcacctgccgttgaagcaacgcttatgaaaagctatgctgacgttcaccaagtgagtgaagcagacgctcgcttatggctgcagcagctagaagaaaaaggccgatacgcaaaagacgtgtgggctggg

SEQ ID NO: 338 - protein, 1049 aa, synthetic construct
  REGION 1..1049: note = Variant of cytochrome P450
MTIKEMPQPKTFGELKNLPLLNTDKPVQALMRIADELGEIFKFEAPGSVTRFLSSQRLIKEACDESRFDKNLSQSLKFARDFLGDGLFTSWTHEPNWKKAHNILGPSFSQRAMKRYHAMMVDIAVQLVQKWERLNADEHIEVSEDMTRLTLDTIGLCGFNYRFNSFYRDQPHPFIVSVVRALDEVMNKLQRANPDDPAYDENKRQCQEDIKVMNDYVDKIIADRKARGEQSHDLLTQMLNGKDPETGEPLDDGNIRYQIITFLIAGHETTSGLLSFALYFLVKNPHVLQKVAEEAARVLVDPVPSYKQVKQLKYVGMVLNEALRLWPTGPAFSLYAKEDTVLGGEYPLTKGDEVMVLIPQLHRDKTIWGDDVEEFRPERFENPSAIPQHAFKPFGNGQRACIGQQFALHEATLVLGMMLKHFDFEDHTNYELVIKEKLTLKPEGFVVKAKSKGIPLGLIPSPSTEQSAKKVRKKAENAHNTPLLVLYGSNAGTAEGTARDLADIAMSKGFAPQVATLDSHAGNLPREGAVLIVTASYNGHPPDNAKQFVDWLDQASADEVKGVRYSVFGCGDKNWAATYQKVPAFIDETLAAKGAENIADRGEADASDDFEGTYEEWSDHMWSDVAAYFNLDIENSEDNKSTLSLQFVDSAADMPLAKMHGAFSTNVVASKELQQPGSARSTRHLEIELPKEASYQEGDHLGVIPRNYEGIVNRVTARFGLSASQQIRLEAEEEKLAHLPLAKTVSVEELLQYVELQDPVTRTQLRAMAAKTVCPPHKVELEALLEKQAYKEQVLAKRLTMLELLEKYPACEMKFSEFIALLPSIRPRYYSISSSPRVDEKQASITVSVVSGPAWSGYGEYKGIASNYLAELQEGDTITCFISTDQSEFTLPKDPETPLIMVGPGTGVAPFRGFVQARKQLKEQGQSLGEAHLYFGCRSPHEDYLYQEELENAQSEGIITLHTAFSRMPNQPKTYVQHVMEQDGKKLIELLDQGAHFYICGDGSQMAPAVEATLMKSYADVHQVSEADARLWLQQLEEKGRYAKDVWAG

SEQ ID NO: 339 - DNA, 3147 bp, synthetic construct
  misc_feature 1..3147: note = Variant of cytochrome P450
  source 1..3147: mol_type = other DNA
atgacaattaaggaaatgcctcagcctaagacgtttggagaacttaaaaatttaccgttattaaacacagataaaccggttcaagctttgatgcgtattgcggatgaattaggagaaatctttaaattcgaggcgcctggtagcgtaacgcgctttttatcaagtcagcgtctaattaaagaagcatgcgatgaatcacgctttgataaaaacttaagtcaatcgctgaaatttgcccgtgattttctgggagacgggttatttacaagctggacgcatgaaccgaattggaaaaaagcgcataatatcttaggcccaagctttagtcagcgtgcaatgaaacgttatcatgcgatgatggtcgatatcgccgtgcagcttgttcaaaagtgggagcgtctaaatgcagatgagcatattgaagtatcggaagacatgacacgtttaacgctggatacaattggtctttgcggcttcaactatcgctttaacagcttttaccgagatcagcctcatccatttattgtgagtgttgtgcgtctgctggatgaaatcatgaacaagctgcagcgagcaaatccagacgacccagcttatgatgaaaacaagcgccagtgtcaagaagatatcaaggtgatgaacgactatgtcgataaaattattgcagatcgcaaagcaaggggtgaacaaagccatgatttattaacgcagatgctaaacggaaaagatccagaaacgggtgagccgcttgatgacgggaacattcgttatcaaattattacattcttaatcgcgggacacgaaacaacaagtggtcttttatcatttgcgctgtatttcttagtgaaaaatccacatgtattacaaaaagtagcagaagaagcagcacgagttctagtagatcctgttccaagctacaaacaagtcaaacagcttaaatatgtcggcatggtcttaaacgaagcgctgcgcttatggccaactggtcctgcgttttccctatatgcaaaagaagatacggtgcttggaggagaatatcctttaaccaaaggcgacgaagtaatggttctgattcctcagcttcaccgtgataaaacaatttggggagacgatgtggaggagttccgtccagagcgttttgaaaatccaagtgcgattccgcagcatgcgtttaaaccgtttggaaacggtcagcgtgcgtgtatcggtcagcagttcgctcttcatgaagcaacgctggtacttggtatgatgctaaaacactttgactttgaagatcatacaaactacgagctcgttattaaggaacgcttaacgttaaaacctgaaggctttgtggtaaaagcaaaatcgaaaggcattccgcttggcggcattccttcacctagcactgaacagtctgctaaaaaagtacgcaaaaaggcagaaaacgctcataatacgccgctgcttgtgctatacggttcaaatgcgggaacagctgaaggaacggcgcgtgatttagcagatattgcaatgagcaaaggatttgcaccgcaggtcgcaacgcttgattcacacgccggaaatcttccgcgcgaaggagctgtattaattgtaacggcgtcttataacggtcatccgcctgataacgcaaagcaatttgtcgactggttagaccaagcgtctgctgatgaagtaaaaggcgttcgctactccgtatttggatgcggcgataaaaactgggctgcgacgtatcaaaaagtgcctgcttttatcgatgaaacgcttgccgctaaaggggcagaaaacatcgctgaccgcggtgaagcagatgcaagcgacgactttgaaggcacgtatgaagaatggagtgatcatatgtggagtgacgtagcagcctactttaacctcgacattgaaaacagtgaagataataaatctactctttcacttcaatttgtcgacagcgccgcggatatgccgcttgcgaaaatgcacggtgcgttttcaacgaacgtcgtagcaagcaaagaacttcaacagccaggcagtgcacgaagcacgcgacatcttgaaattgaacttccaaaagaagcttcttatcaagaaggagatcatttaggtgttattcctcgcaactatgaaggaatagtaaaccgtgtaacagcaaggttcggcctaagcgcatcacagcaaatccgtctggaagcagaagaagaaaaattagctcatttgccactcgctaaaacagtatccgtagaagagcttctgcaatacgtggagcttcaagatcctgttacgcgcacgcagcttcgcgcaatggctgctaaaacggtctgcccgccgcataaagtagagcttgaagccttgcttgaaaagcaagcctacaaagaacaagtgctggcaaaacgtttaacaatgcttgaactgcttgaaaaatacccggcgtgtgaaatgaaattcagcgaatttatcgcccttctgccaagcatacgcccgcgctattactcgatttcttcatcacctcgtgtcgatgaaaaacaagcaagcatcacggtcagcgttgtctcaggaccggcgtggagcggatatggagaatataaaggaattgcgtcgaactatcttgccgagctgcaagaaggagatacgattacgtgctttatttccacagatcagtcagaatttacgctgccaaaagaccctgaaacgccgcttatcatggtcggaccgggaacaggcgtcgcgccgtttagaggctttgtgcaggcgcgcaaacagctaaaagaacaaggacagtcacttggagaagcacatttatacttcggctgccgttcacctcatgaagactatctgtatcaagaagagcttgaaaacgcccaaagcgaaggcatcattacgcttcataccgctttttctcgcatgccaaatcagccgaaaacatacgttcagcacgtaatggaacaagacggcaagaaattgattgaacttcttgatcaaggagcgcacttctatatttgcggagacggaagccaaatggcacctgccgttgaagcaacgcttatgaaaagctatgctgacgttcaccaagtgagtgaagcagacgctcgcttatggctgcagcagctagaagaaaaaggccgatacgcaaaagacgtgtgggctggg

SEQ ID NO: 340 - protein, 1049 aa, synthetic construct
  REGION 1..1049: note = Variant of cytochrome P450
MTIKEMPQPKTFGELKNLPLLNTDKPVQALMRIADELGEIFKFEAPGSVTRFLSSQRLIKEACDESRFDKNLSQSLKFARDFLGDGLFTSWTHEPNWKKAHNILGPSFSQRAMKRYHAMMVDIAVQLVQKWERLNADEHIEVSEDMTRLTLDTIGLCGFNYRFNSFYRDQPHPFIVSVVRLLDEIMNKLQRANPDDPAYDENKRQCQEDIKVMNDYVDKIIADRKARGEQSHDLLTQMLNGKDPETGEPLDDGNIRYQIITFLIAGHETTSGLLSFALYFLVKNPHVLQKVAEEAARVLVDPVPSYKQVKQLKYVGMVLNEALRLWPTGPAFSLYAKEDTVLGGEYPLTKGDEVMVLIPQLHRDKTIWGDDVEEFRPERFENPSAIPQHAFKPFGNGQRACIGQQFALHEATLVLGMMLKHFDFEDHTNYELVIKERLTLKPEGFVVKAKSKGIPLGGIPSPSTEQSAKKVRKKAENAHNTPLLVLYGSNAGTAEGTARDLADIAMSKGFAPQVATLDSHAGNLPREGAVLIVTASYNGHPPDNAKQFVDWLDQASADEVKGVRYSVFGCGDKNWAATYQKVPAFIDETLAAKGAENIADRGEADASDDFEGTYEEWSDHMWSDVAAYFNLDIENSEDNKSTLSLQFVDSAADMPLAKMHGAFSTNVVASKELQQPGSARSTRHLEIELPKEASYQEGDHLGVIPRNYEGIVNRVTARFGLSASQQIRLEAEEEKLAHLPLAKTVSVEELLQYVELQDPVTRTQLRAMAAKTVCPPHKVELEALLEKQAYKEQVLAKRLTMLELLEKYPACEMKFSEFIALLPSIRPRYYSISSSPRVDEKQASITVSVVSGPAWSGYGEYKGIASNYLAELQEGDTITCFISTDQSEFTLPKDPETPLIMVGPGTGVAPFRGFVQARKQLKEQGQSLGEAHLYFGCRSPHEDYLYQEELENAQSEGIITLHTAFSRMPNQPKTYVQHVMEQDGKKLIELLDQGAHFYICGDGSQMAPAVEATLMKSYADVHQVSEADARLWLQQLEEKGRYAKDVWAG

SEQ ID NO: 341 - DNA, 3147 bp, synthetic construct
  misc_feature 1..3147: note = Variant of cytochrome P450
  source 1..3147: mol_type = other DNA
atgacaattaaggaaatgcctcagcctaagacgtttggagaacttaaaaatttaccgttattaaacacagataaaccggttcaagctttgatgcgtattgcggatgaattaggagaaatctttaaattcgaggcgcctggtagcgtaacgcgctttttatcaagtcagcgtctaattaaagaagcatgcgatgaacgtcgctttgataaaaacttaagtcaatcgctgaaatttgcccgtgattttctgggagacgggttatttacaagctggacgcatgaaccgaattggaaaaaagcgcataatatcttaggcccaagctttagtcagcgtgcaatgaaacgttatcatgcgatgatggtcgatatcgccgtgcagcttgttcaaaagtgggagcgtctaaatgcagatgagcatattgaagtatcggaagacatgacacgtttaacgctggatacaattggtctttgcggcttcaactatcgctttaacagcttttaccgagatcagcctcatccatttattgtgagtgttgtgcgtgcactggatgaagtaatgaacaagctgcagcgagcaaatccagacgacccagcttatgatgaaaacaagcgccagtgtcaagaagatattaaggtgatgaacgactatgtcgataaaattattgcagatcgcaaagcaaggggtgaacaaagccatgatttattaacgcagatgctaaacggaaaagatccagaaacgggtgagccgcttgatgacgggaacattcgttatcaaattattacattcttaatcgcgggacacgaaacaacaagtggtcttttatcatttgcgctgtatttcttagtgaaaaatccacatgtattacaaaaagtagcagaagaagcagcacgagttctagtagatcctgttccaagctacaaacaagtcaaacagcttaaatatgtcggcatggtcttaaacgaagcgctgcgcttatggccaactggtcctgcgttttccctatatgcaaaagaagatacggtgcttggaggagaatatcctttaaccaaaggcgacgaagtaatggttctgattcctcagcttcaccgtgataaaacaatttggggagacgatgtggaggagttccgtccagagcgttttgaaaatccaagtgcgattccgcagcatgcgtttaaaccgtttggaaacggtcagcgtgcgtgtatcggtcagcagttcgctcttcatgaagcaacgctggtacttggtatgatgctaaaacactttgactttgaagatcatacaaactacgagctcgttattaaagaaaagttaacgttaaaacctgaaggctttgtggtaaaagcaaaatcgaaaggcattccgcttggcctgattccttcacctagcactgaacagtctgctaaaaaagtacgcaaaaaggcagaaaacgctcataatacgccgctgcttgtgctatacggttcaaatgcgggaacagctgaaggaacggcgcgtgatttagcagatattgcaatgagcaaaggatttgcaccgcaggtcgcaacgcttgattcacacgccggaaatcttccgcgcgaaggagctgtattaattgtaacggcgtcttataacggtcatccgcctgataacgcaaagcaatttgtcgactggttagaccaagcgtctgctgatgaagtaaaaggcgttcgctactccgtatttggatgcggcgataaaaactgggctgcgacgtatcaaaaagtgcctgcttttatcgatgaaacgcttgccgctaaaggggcagaaaacatcgctgaccgcggtgaagcagatgcaagcgacgactttgaaggcgcgtatgaagaatggagtgatcatatgtggagtgacgtagcagcctactttaacctcgacattgaaaacagtgaagataataaatctactctttcacttcaatttgtcgacagcgccgcggatatgccgcttgcgaaaatgcacggtgcgttttcaacgaacgtcgtagcaagcaaagaacttcaacagccaggcagtgcacgaagcacgcgacatcttgaaattgaacttccaaaagaagcttcttatcaagaaggagatcatttaggtgttattcctcgcaactatgaaggaatagtaaaccgtgtaacagcaaggttcggcctaagcgcatcacagcaaatccgtctggaagcagaagaagaaaaattagctcatttgccactcgctaaaacagtatccgtagaagagcttctgcaatacgtggagcttcaagatcctgttacgcgcacgcagcttcgcgcaatggctgctaaaacggtctgcccgccgcataaagtagagcttgaagccttgcttgaaaagcaagcctacaaagaacaagtgctggcaaaacgtttaacaatgcttgaactgcttgaaaaatacccggcgtgtgaaatgaaattcagcgaatttatcgcccttctgccaagcatacgcccgcgctattactcgatttcttcatcacctcgtgtcgatgaaaaacaagcaagcatcacggtcagcgttgtctcaggaccggcgtggagcggatatggagaatataaaggaattgcgtcgaactatcttgccgagctgcaagaaggagatacgattacgtgctttatttccacagatcagtcagaatttacgctgccaaaagaccctgaaacgccgcttatcatggtcggaccgggaacaggcgtcgcgccgtttagaggctttgtgcaggcgcgcaaacagctaaaagaacaaggacagtcacttggagaagcacatttatacttcggctgccgttcacctcatgaagactatctgtatcaagaagagcttgaaaacgcccaaagcgaaggcatcattacgcttcataccgctttttctcgcatgccaaatcagccgaaaacatacgttcagcacgtaatggaacaagacggcaagaaattgattgaacttcttgatcaaggagcgcacttctatatttgcggagacggaagccaaatggcacctgccgttgaagcaacgcttatgaaaagctatgctgacgttcaccaagtgagtgaagcagacgctcgcttatggctgcagcagctagaagaaaaaggccgatacgcaaaagacgtgtgggctggg

SEQ ID NO: 342 - protein, 1049 aa, synthetic construct
  REGION 1..1049: note = Variant of cytochrome P450
MTIKEMPQPKTFGELKNLPLLNTDKPVQALMRIADELGEIFKFEAPGSVTRFLSSQRLIKEACDERRFDKNLSQSLKFARDFLGDGLFTSWTHEPNWKKAHNILGPSFSQRAMKRYHAMMVDIAVQLVQKWERLNADEHIEVSEDMTRLTLDTIGLCGFNYRFNSFYRDQPHPFIVSVVRALDEVMNKLQRANPDDPAYDENKRQCQEDIKVMNDYVDKIIADRKARGEQSHDLLTQMLNGKDPETGEPLDDGNIRYQIITFLIAGHETTSGLLSFALYFLVKNPHVLQKVAEEAARVLVDPVPSYKQVKQLKYVGMVLNEALRLWPTGPAFSLYAKEDTVLGGEYPLTKGDEVMVLIPQLHRDKTIWGDDVEEFRPERFENPSAIPQHAFKPFGNGQRACIGQQFALHEATLVLGMMLKHFDFEDHTNYELVIKEKLTLKPEGFVVKAKSKGIPLGLIPSPSTEQSAKKVRKKAENAHNTPLLVLYGSNAGTAEGTARDLADIAMSKGFAPQVATLDSHAGNLPREGAVLIVTASYNGHPPDNAKQFVDWLDQASADEVKGVRYSVFGCGDKNWAATYQKVPAFIDETLAAKGAENIADRGEADASDDFEGAYEEWSDHMWSDVAAYFNLDIENSEDNKSTLSLQFVDSAADMPLAKMHGAFSTNVVASKELQQPGSARSTRHLEIELPKEASYQEGDHLGVIPRNYEGIVNRVTARFGLSASQQIRLEAEEEKLAHLPLAKTVSVEELLQYVELQDPVTRTQLRAMAAKTVCPPHKVELEALLEKQAYKEQVLAKRLTMLELLEKYPACEMKFSEFIALLPSIRPRYYSISSSPRVDEKQASITVSVVSGPAWSGYGEYKGIASNYLAELQEGDTITCFISTDQSEFTLPKDPETPLIMVGPGTGVAPFRGFVQARKQLKEQGQSLGEAHLYFGCRSPHEDYLYQEELENAQSEGIITLHTAFSRMPNQPKTYVQHVMEQDGKKLIELLDQGAHFYICGDGSQMAPAVEATLMKSYADVHQVSEADARLWLQQLEEKGRYAKDVWAG

SEQ ID NO: 343 - DNA, 3147 bp, synthetic construct
  misc_feature 1..3147: note = Variant of cytochrome P450
  source 1..3147: mol_type = other DNA
atgacaattaaggaaatgcctcagcctaagacgtttggagaacttaaaaatttaccgttattaaacacagataaaccggttcaagctttgatgcgtattgcggatgaattaggagaaatctttaaattcgaggcgcctggtagcgtaacgcgctttttatcaagtcagcgtctaattaaagaagcatgcgatgaaagtcgctttgataaaaacttaagtcaatcgctgaaatttgcccgtgattttctgggagacgggttattcacaagctggacgcatgaaccgaattggaaaaaagcgcataatatcttaggcccaagctttagtcagcgtgcaatgaaacgttatcatgcgatgatggtcgatatcgccgtgcagcttgttcaaaagtgggagcgtctaaatgcagatgagcatattgaagtatcggaagacatgacacgtttaacgctggatacaattggtctttgcggcttcaactatcgctttaacagcttttaccgagatcagcctcatccatttattgtgagtgttgtgcgtgcactggatgaagtaatgaacaagctgcagcgagcaaatccagacgacccagcttatgatgaaaacaagcgccagtgtcaagaagatatcaaggtgatgaacgactatgtcgataaaattattgcagatcgcaaagcaaggggtgaacaaagccatgatttattaacgcagatgctaaacggaaaagatccagaaacgggtgagccgcttgatgacgggaacattcgttatcaaattattacattcttaatcgcgggacacgaaacaacaagtggtcttttatcatttgcgctgtatttcttagtgaaaaatccacatgtattacaaaaagtagcagaagaagcagcacgagttctagtagatcctgttccaagctacaaacaagtcaaacagcttaaatatgtcggcatggtcttaaacgaagcgctgcgcttatggccaactggtcctgcgttttccctatatgcaaaagaagatacggtgcttggaggagaatatcctttaaccaaaggcgacgaagtaatggttctgattcctcagcttcaccgtgataaaacaatttggggagacgatgtggaggagttccgtccagagcgttttgaaaatccaagtgcgattccgcagcatgcgtttaaaccgtttggaaacggtcagcgtgcgtgtatcggtcagcagttcgctcttcatgaagcaacgctggtacttggtatgatgctaaaacactttgactttgaagatcatacaaactacgagctcgttattggcgaacgcttaacgttaaaacctgaaggctttgtggtaaaagcaaaatcgaaaggcattccgcttggcctgattccttcacctagcactgaacagtctgctaaaaaagtacgcaaaaaggcagaaaacgctcataatacgccgctgcttgtgctatacggttcaaatgcgggaacagctgaaggaacggcgcgtgatttagcagatattgcaatgagcaaaggatttgcaccgcaggtcgcaacgcttgattcacacgccggaaatcttccgcgcgaaggagctgtattaattgtaacggcgtcttataacggtcatccgcctgataacgcaaagcaatttgtcgactggttagaccaagcgtctgctgatgaagtaaaaggcgttcgctactccgtatttggatgcggcgataaaaactgggctgcgacgtatcaaaaagtgcctgcttttatcgatgaaacgcttgccgctaaaggggcagaaaacatcgctgaccgcggtgaagcagatgcaagcgacgactttgaaggcacgtatgaagaatggagtgatcatatgtggagtgacgtagcagcctactttaacctcgacattgaaaacagtgaagataataaatctactctttcacttcaatttgtcgacagcgccgcggatatgccgcttgcgaaaatgcacggtgcgttttcaacgaacgtcgtagcaagcaaagaacttcaacagccaggcagtgcacgaagcacgcgacatcttgaaattgaacttccaaaagaagcttcttatcaagaaggagatcatttaggtgttattcctcgcaactatgaaggaatagtaaaccgtgtaacagcaaggttcggcctaagcgcatcacagcaaatccgtctggaagcagaagaagaaaaattagctcatttgccactcgctaaaacagtatccgtagaagagcttctgcaatacgtggagcttcaagatcctgttacgcgcacgcagcttcgcgcaatggctgctaaaacggtctgcccgccgcataaagtagagcttgaagccttgcttgaaaagcaagcctacaaagaacaagtgctggcaaaacgtttaacaatgcttgaactgcttgaaaaatacccggcgtgtgaaatgaaattcagcgaatttatcgcccttctgccaagcatacgcccgcgctattactcgatttcttcatcacctcgtgtcgatgaaaaacaagcaagcatcacggtcagcgttgtctcaggaccggcgtggagcggatatggagaatataaaggaattgcgtcgaactatcttgccgagctgcaagaaggagatacgattacgtgctttatttccacagatcagtcagaatttacgctgccaaaagaccctgaaacgccgcttatcatggtcggaccgggaacaggcgtcgcgccgtttagaggctttgtgcaggcgcgcaaacagctaaaagaacaaggacagtcacttggagaagcacatttatacttcggctgccgttcacctcatgaagactatctgtatcaagaagagcttgaaaacgcccaaagcgaaggcatcattacgcttcataccgctttttctcgcatgccaaatcagccgaaaacatacgttcagcacgtaatggaacaagacggcaagaaattgattgaacttcttgatcaaggagcgcacttctatatttgcggagacggaagccaaatggcacctgccgttgaagcaacgcttatgaaaagctatgctgacgttcaccaagtgagtgaagcagacgctcgcttatggctgcagcagctagaagaaaaaggccgatacgcaaaagacgtgtgggctggg

SEQ ID NO: 344 - protein, 1049 aa, synthetic construct
  REGION 1..1049: note = Variant of cytochrome P450
MTIKEMPQPKTFGELKNLPLLNTDKPVQALMRIADELGEIFKFEAPGSVTRFLSSQRLIKEACDESRFDKNLSQSLKFARDFLGDGLFTSWTHEPNWKKAHNILGPSFSQRAMKRYHAMMVDIAVQLVQKWERLNADEHIEVSEDMTRLTLDTIGLCGFNYRFNSFYRDQPHPFIVSVVRALDEVMNKLQRANPDDPAYDENKRQCQEDIKVMNDYVDKIIADRKARGEQSHDLLTQMLNGKDPETGEPLDDGNIRYQIITFLIAGHETTSGLLSFALYFLVKNPHVLQKVAEEAARVLVDPVPSYKQVKQLKYVGMVLNEALRLWPTGPAFSLYAKEDTVLGGEYPLTKGDEVMVLIPQLHRDKTIWGDDVEEFRPERFENPSAIPQHAFKPFGNGQRACIGQQFALHEATLVLGMMLKHFDFEDHTNYELVIGERLTLKPEGFVVKAKSKGIPLGLIPSPSTEQSAKKVRKKAENAHNTPLLVLYGSNAGTAEGTARDLADIAMSKGFAPQVATLDSHAGNLPREGAVLIVTASYNGHPPDNAKQFVDWLDQASADEVKGVRYSVFGCGDKNWAATYQKVPAFIDETLAAKGAENIADRGEADASDDFEGTYEEWSDHMWSDVAAYFNLDIENSEDNKSTLSLQFVDSAADMPLAKMHGAFSTNVVASKELQQPGSARSTRHLEIELPKEASYQEGDHLGVIPRNYEGIVNRVTARFGLSASQQIRLEAEEEKLAHLPLAKTVSVEELLQYVELQDPVTRTQLRAMAAKTVCPPHKVELEALLEKQAYKEQVLAKRLTMLELLEKYPACEMKFSEFIALLPSIRPRYYSISSSPRVDEKQASITVSVVSGPAWSGYGEYKGIASNYLAELQEGDTITCFISTDQSEFTLPKDPETPLIMVGPGTGVAPFRGFVQARKQLKEQGQSLGEAHLYFGCRSPHEDYLYQEELENAQSEGIITLHTAFSRMPNQPKTYVQHVMEQDGKKLIELLDQGAHFYICGDGSQMAPAVEATLMKSYADVHQVSEADARLWLQQLEEKGRYAKDVWAG

SEQ ID NO: 345 - DNA, 3147 bp, synthetic construct
  misc_feature 1..3147: note = Variant of cytochrome P450
  source 1..3147: mol_type = other DNA
atgacaattaaggaaatgcctcagcctaagacgtttggagaacttaaaaatttaccgttattaaacacagataaaccggttcaagctttgatgcgtattgcggatgaattaggagaaatctttaaattcgaggcgcctggtagcgtaacgcgctttttatcaagtcagcgtctaattaaagaagcatgcgatgaacgtcgctttgataaaaacttaagtcaatcgctgaaatttgcccgtgattttctgggagacgggttatttacaagctggacgcatgaaccgaattggaaaaaagcgcataatatcttaggcccaagctttagtcagcgtgcaatgaaacgttatcatgcgatgatggtcgatatcgccgtgcagcttgttcaaaagtgggagcgtctaaatgcagatgagcatattgaagtatcggaagacatgacacgtttaacgctggatacaattggtctttgcggcttcaactatcgctttaacagcttttaccgagatcagcctcatccatttattgtgagtgttgtgcgtctgctggatgaactgatgaacaagctgcagcgagcaaatccagacgacccagcttatgatgaaaacaagcgccagtgtcaagaagatgccaaggtgatgaacgactatgtcgataaaattattgcagatcgcaaagcaaggggtgaacaaagccatgatttattaacgcagatgctaaacggaaaagatccagaaacgggtgagccgcttgatgacgggaacattcgttatcaaattattacattcttaatcgcgggacacgaaacaacaagtggtcttttatcatttgcgctgtatttcttagtgaaaaatccacatgtattacaaaaagtagcagaagaagcagcacgagttctagtagatcctgttccaagctacaaacaagtcaaacagcttaaatatgtcggcatggtcttaaacgaagcgctgcgcttatggccaactggtcctgcgttttccctatatgcaaaagaagatacggtgcttggaggagaatatcctttaaccaaaggcgacgaagtaatggttctgattcctcagcttcaccgtgataaaacaatttggggagacgatgtggaggagttccgtccagagcgttttgaaaatccaagtgcgattccgcagcatgcgtttaaaccgtttggaaacggtcagcgtgcgtgtatcggtcagcagttcgctcttcatgaagcaacgctggtacttggtatgatgctaaaacactttgactttgaagatcatacaaactacgagctcgttattaaggaacgcttaacgttaaaacctgaaggctttgtggtaaaagcaaaatcgaaaggcattccgcttggcctgattccttcacctagcactgaacagtctgctaaaaaagtacgcaaaaaggcagaaaacgctcataatacgccgctgcttgtgctatacggttcaaatgcgggaacagctgaaggaacggcgcgtgatttagcagatattgcaatgagcaaaggatttgcaccgcaggtcgcaacgcttgattcacacgccggaaatcttccgcgcgaaggagctgtattaattgtaacggcgtcttataacggtcatccgcctgataacgcaaagcaatttgtcgactggttagaccaagcgtctgctgatgaagtaaaaggcgttcgctactccgtatttggatgcggcgataaaaactgggctgcgacgtatcaaaaagtgcctgcttttatcgatgaaacgcttgccgctaaaggggcagaaaacatcgctgaccgcggtgaagcagatgcaagcgacgactttgaaggcgcgtatgaagaatggagtgatcatatgtggagtgacgtagcagcctactttaacctcgacattgaaaacagtgaagataataaatctactctttcacttcaatttgtcgacagcgccgcggatatgccgcttgcgaaaatgcacggtgcgttttcaacgaacgtcgtagcaagcaaagaacttcaacagccaggcagtgcacgaagcacgcgacatcttgaaattgaacttccaaaagaagcttcttatcaagaaggagatcatttaggtgttattcctcgcaactatgaaggaatagtaaaccgtgtaacagcaaggttcggcctaagcgcatcacagcaaatccgtctggaagcagaagaagaaaaattagctcatttgccactcgctaaaacagtatccgtagaagagcttctgcaatacgtggagcttcaagatcctgttacgcgcacgcagcttcgcgcaatggctgctaaaacggtctgcccgccgcataaagtagagcttgaagccttgcttgaaaagcaagcctacaaagaacaagtgctggcaaaacgtttaacaatgcttgaactgcttgaaaaatacccggcgtgtgaaatgaaattcagcgaatttatcgcccttctgccaagcatacgcccgcgctattactcgatttcttcatcacctcgtgtcgatgaaaaacaagcaagcatcacggtcagcgttgtctcaggaccggcgtggagcggatatggagaatataaaggaattgcgtcgaactatcttgccgagctgcaagaaggagatacgattacgtgctttatttccacagatcagtcagaatttacgctgccaaaagaccctgaaacgccgcttatcatggtcggaccgggaacaggcgtcgcgccgtttagaggctttgtgcaggcgcgcaaacagctaaaagaacaaggacagtcacttggagaagcacatttatacttcggctgccgttcacctcatgaagactatctgtatcaagaagagcttgaaaacgcccaaagcgaaggcatcattacgcttcataccgctttttctcgcatgccaaatcagccgaaaacatacgttcagcacgtaatggaacaagacggcaagaaattgattgaacttcttgatcaaggagcgcacttctatatttgcggagacggaagccaaatggcacctgccgttgaagcaacgcttatgaaaagctatgctgacgttcaccaagtgagtgaagcagacgctcgcttatggctgcagcagctagaagaaaaaggccgatacgcaaaagacgtgtgggctggg

SEQ ID NO: 346 - protein, 1049 aa, synthetic construct
  REGION 1..1049: note = Variant of cytochrome P450
MTIKEMPQPKTFGELKNLPLLNTDKPVQALMRIADELGEIFKFEAPGSVTRFLSSQRLIKEACDERRFDKNLSQSLKFARDFLGDGLFTSWTHEPNWKKAHNILGPSFSQRAMKRYHAMMVDIAVQLVQKWERLNADEHIEVSEDMTRLTLDTIGLCGFNYRFNSFYRDQPHPFIVSVVRLLDELMNKLQRANPDDPAYDENKRQCQEDAKVMNDYVDKIIADRKARGEQSHDLLTQMLNGKDPETGEPLDDGNIRYQIITFLIAGHETTSGLLSFALYFLVKNPHVLQKVAEEAARVLVDPVPSYKQVKQLKYVGMVLNEALRLWPTGPAFSLYAKEDTVLGGEYPLTKGDEVMVLIPQLHRDKTIWGDDVEEFRPERFENPSAIPQHAFKPFGNGQRACIGQQFALHEATLVLGMMLKHFDFEDHTNYELVIKERLTLKPEGFVVKAKSKGIPLGLIPSPSTEQSAKKVRKKAENAHNTPLLVLYGSNAGTAEGTARDLADIAMSKGFAPQVATLDSHAGNLPREGAVLIVTASYNGHPPDNAKQFVDWLDQASADEVKGVRYSVFGCGDKNWAATYQKVPAFIDETLAAKGAENIADRGEADASDDFEGAYEEWSDHMWSDVAAYFNLDIENSEDNKSTLSLQFVDSAADMPLAKMHGAFSTNVVASKELQQPGSARSTRHLEIELPKEASYQEGDHLGVIPRNYEGIVNRVTARFGLSASQQIRLEAEEEKLAHLPLAKTVSVEELLQYVELQDPVTRTQLRAMAAKTVCPPHKVELEALLEKQAYKEQVLAKRLTMLELLEKYPACEMKFSEFIALLPSIRPRYYSISSSPRVDEKQASITVSVVSGPAWSGYGEYKGIASNYLAELQEGDTITCFISTDQSEFTLPKDPETPLIMVGPGTGVAPFRGFVQARKQLKEQGQSLGEAHLYFGCRSPHEDYLYQEELENAQSEGIITLHTAFSRMPNQPKTYVQHVMEQDGKKLIELLDQGAHFYICGDGSQMAPAVEATLMKSYADVHQVSEADARLWLQQLEEKGRYAKDVWAG

SEQ ID NO: 347 - DNA, 3147 bp, synthetic construct
  misc_feature 1..3147: note = Variant of cytochrome P450
  source 1..3147: mol_type = other DNA
atgacaattaaggaaatgcctcagcctaagacgtttggagaacttaaaaatttaccgttattaaacacagataaaccggttcaagctttgatgcgtattgcggatgaattaggagaaatctttaaattcgaggcgcctggtagcgtaacgcgctttttatcaagtcagcgtctaattaaagaagcatgcgatgaacgtcgctttgataaaaacttaagtcaatcgctgaaatttgggcgtgattttctgggagacgggttattcacaagctggacgcatgaaccgaattggaaaaaagcgcataatatcttaggcccaagctttagtcagcgtgcaatgaaacgttatcatgcgatgatggtcgatatcgccgtgcagcttgttcaaaagtgggagcgtctaaatgcagatgagcatattgaagtatcggaagacatgacacgtttaacgctggatacaattggtctttgcggcttcaactatcgctttaacagcttttaccgagatcagcctcatccatttattgtgagtgttgtgcgtgcactggatgaagtaatgaacaagctgcagcgagcaaatccagacgacccagcttatgatgaaaacaagcgccagtgtcaagaagatatcaaggtgatgaacgactatgtcgataaaattattgcagatcgcaaagcaaggggtgaacaaagccatgatttattaacgcagatgctaaacggaaaagatccagaaacgggtgagccgcttgatgacgggaacattcgttatcaaattattacattcttaatcgcgggacacgaaacaacaagtggtcttttatcatttgcgctgtatttcttagtgaaaaatccacatgtattacaaaaagtagcagaagaagcagcacgagttctagtagatcctgttccaagctacaaacaagtcaaacagcttaaatatgtcggcatggtcttaaacgaagcgctgcgcttatggccaactggtcctgcgttttccctatatgcaaaagaagatacggtgcttggaggagaatatcctttaaccaaaggcgacgaagtaatggttctgattcctcagcttcaccgtgataaaacaatttggggagacgatgtggaggagttccgtccagagcgttttgaaaatccaagtgcgattccgcagcatgcgtttaaaccgtttggaaacggtcagcgtgcgtgtatcggtcagcagttcgctcttcatgaagcaacgctggtacttggtatgatgctaaaacactttgactttgaagatcatacaaactacgagctcgttattaaggaacgcttaacgttaaaacctgaaggctttgtggtaaaagcaaaatcgaaaggcattccgcttggcctgattccttcacctagcactgaacagtctgctaaaaaagtacgcaaaaaggcagaaaacgctcataatacgccgctgcttgtgctatacggttcaaatgcgggaacagctgaaggaacggcgcgtgatttagcagatattgcaatgagcaaaggatttgcaccgcaggtcgcaacgcttgattcacacgccggaaatcttccgcgcgaaggagctgtattaattgtaacggcgtcttataacggtcatccgcctgataacgcaaagcaatttgtcgactggttagaccaagcgtctgctgatgaagtaaaaggcgttcgctactccgtatttggatgcggcgataaaaactgggctgcgacgtatcaaaaagtgcctgcttttatcgatgaaacgcttgccgctaaaggggcagaaaacatcgctgaccgcggtgaagcagatgcaagcgacgactttgaaggcacgtatgaagaatggagtgatcatatgtggagtgacgtagcagcctactttaacctcgacattgaaaacagtgaagataataaatctactctttcacttcaatttgtcgacagcgccgcggatatgccgcttgcgaaaatgcacggtgcgttttcaacgaacgtcgtagcaagcaaagaacttcaacagccaggcagtgcacgaagcacgcgacatcttgaaattgaacttccaaaagaagcttcttatcaagaaggagatcatttaggtgttattcctcgcaactatgaaggaatagtaaaccgtgtaacagcaaggttcggcctaagcgcatcacagcaaatccgtctggaagcagaagaagaaaaattagctcatttgccactcgctaaaacagtatccgtagaagagcttctgcaatacgtggagcttcaagatcctgttacgcgcacgcagcttcgcgcaatggctgctaaaacggtctgcccgccgcataaagtagagcttgaagccttgcttgaaaagcaagcctacaaagaacaagtgctggcaaaacgtttaacaatgcttgaactgcttgaaaaatacccggcgtgtgaaatgaaattcagcgaatttatcgcccttctgccaagcatacgcccgcgctattactcgatttcttcatcacctcgtgtcgatgaaaaacaagcaagcatcacggtcagcgttgtctcaggaccggcgtggagcggatatggagaatataaaggaattgcgtcgaactatcttgccgagctgcaagaaggagatacgattacgtgctttatttccacagatcagtcagaatttacgctgccaaaagaccctgaaacgccgcttatcatggtcggaccgggaacaggcgtcgcgccgtttagaggctttgtgcaggcgcgcaaacagctaaaagaacaaggacagtcacttggagaagcacatttatacttcggctgccgttcacctcatgaagactatctgtatcaagaagagcttgaaaacgcccaaagcgaaggcatcattacgcttcataccgctttttctcgcatgccaaatcagccgaaaacatacgttcagcacgtaatggaacaagacggcaagaaattgattgaacttcttgatcaaggagcgcacttctatatttgcggagacggaagccaaatggcacctgccgttgaagcaacgcttatgaaaagctatgctgacgttcaccaagtgagtgaagcagacgctcgcttatggctgcagcagctagaagaaaaaggccgatacgcaaaagacgtgtgggctggg

SEQ ID NO: 348 - protein, 1049 aa, synthetic construct
  REGION 1..1049: note = Variant of cytochrome P450
MTIKEMPQPKTFGELKNLPLLNTDKPVQALMRIADELGEIFKFEAPGSVTRFLSSQRLIKEACDERRFDKNLSQSLKFGRDFLGDGLFTSWTHEPNWKKAHNILGPSFSQRAMKRYHAMMVDIAVQLVQKWERLNADEHIEVSEDMTRLTLDTIGLCGFNYRFNSFYRDQPHPFIVSVVRALDEVMNKLQRANPDDPAYDENKRQCQEDIKVMNDYVDKIIADRKARGEQSHDLLTQMLNGKDPETGEPLDDGNIRYQIITFLIAGHETTSGLLSFALYFLVKNPHVLQKVAEEAARVLVDPVPSYKQVKQLKYVGMVLNEALRLWPTGPAFSLYAKEDTVLGGEYPLTKGDEVMVLIPQLHRDKTIWGDDVEEFRPERFENPSAIPQHAFKPFGNGQRACIGQQFALHEATLVLGMMLKHFDFEDHTNYELVIKERLTLKPEGFVVKAKSKGIPLGLIPSPSTEQSAKKVRKKAENAHNTPLLVLYGSNAGTAEGTARDLADIAMSKGFAPQVATLDSHAGNLPREGAVLIVTASYNGHPPDNAKQFVDWLDQASADEVKGVRYSVFGCGDKNWAATYQKVPAFIDETLAAKGAENIADRGEADASDDFEGTYEEWSDHMWSDVAAYFNLDIENSEDNKSTLSLQFVDSAADMPLAKMHGAFSTNVVASKELQQPGSARSTRHLEIELPKEASYQEGDHLGVIPRNYEGIVNRVTARFGLSASQQIRLEAEEEKLAHLPLAKTVSVEELLQYVELQDPVTRTQLRAMAAKTVCPPHKVELEALLEKQAYKEQVLAKRLTMLELLEKYPACEMKFSEFIALLPSIRPRYYSISSSPRVDEKQASITVSVVSGPAWSGYGEYKGIASNYLAELQEGDTITCFISTDQSEFTLPKDPETPLIMVGPGTGVAPFRGFVQARKQLKEQGQSLGEAHLYFGCRSPHEDYLYQEELENAQSEGIITLHTAFSRMPNQPKTYVQHVMEQDGKKLIELLDQGAHFYICGDGSQMAPAVEATLMKSYADVHQVSEADARLWLQQLEEKGRYAKDVWAG

SEQ ID NO: 349 - DNA, 3147 bp, synthetic construct
  misc_feature 1..3147: note = Variant of cytochrome P450
  source 1..3147: mol_type = other DNA
atgacaattaaggaaatgcctcagcctaagacgtttggagaacttaaaaatttaccgttattaaacacagataaaccggttcaagctttgatgcgtattgcggatgaattaggagaaatctttaaattcgaggcgcctggtagcgtaacgcgctttttatcaagtcagcgtctaattaaagaagcatgcgatgaacgtcgctttgataaaaacttaagtcaatcgctgaaatttgcccgtgcttttctgggagacgggttatttacaagctggacgcatgaaccgaattggaaaaaagcgcataatatcttaggcccaagctttagtcagcgtgcaatgaaacgttatcatgcgatgatggtcgatatcgccgtgcagcttgttcaaaagtgggagcgtctaaatgcagatgagcatattgaagtatcggaagacatgacacgtttaacgctggatacaattggtctttgcggcttcaactatcgctttaacagcttttaccgagatcagcctcatccatttattgtgagtgttgtgcgtgcactggatgaagtaatgaacaagctgcagcgagcaaatccagacgacccagcttatgatgaaaacaagcgccagtttcaagaagatatcaaggtgatgaacgactatgtcgataaaattattgcagatcgcaaagcaaggggtgaacaaagccatgatttattaacgcagatgctaaacggaaaagatccagaaacgggtgagccgcttgatgacgggaacattcgttatcaaattattacattcttaatcgcgggacacgaaacaacaagtggtcttttatcatttgcgctgtatttcttagtgaaaaatccacatgtattacaaaaagtagcagaagaagcagcacgagttctagtagatcctgttccaagctacaaacaagtcaaacagcttaaatatgtcggcatggtcttaaacgaagcgctgcgcttatggccaactggtcctgcgttttccctatatgcaaaagaagatacggtgcttggaggagaatatcctttaaccaaaggcgacgaagtaatggttctgattcctcagcttcaccgtgataaaacaatttggggagacgatgtggaggagttccgtccagagcgttttgaaaatccaagtgcgattccgcagcatgcgtttaaaccgtttggaaacggtcagcgtgcgtgtatcggtcagcagttcgctcttcatgaagcaacgctggtacttggtatgatgctaaaacactttgactttgaagatcatacaaactacgagctcgttattggcgaacgcttaacgttaaaacctgaaggctttgtggtaaaagcaaaatcgaaaggcattccgcttggcggtattccttcacctagcactgaacagtctgctaaaaaagtacgcaaaaaggcagaaaacgctcataatacgccgctgcttgtgctatacggttcaaatgcgggaacagctgaaggaacggcgcgtgatttagcagatattgcaatgagcaaaggatttgcaccgcaggtcgcaacgcttgattcacacgccggaaatcttccgcgcgaaggagctgtattaattgtaacggcgtcttataacggtcatccgcctgataacgcaaagcaatttgtcgactggttagaccaagcgtctgctgatgaagtaaaaggcgttcgctactccgtatttggatgcggcgataaaaactgggctgcgacgtatcaaaaagtgcctgcttttatcgatgaaacgcttgccgctaaaggggcagaaaacatcgctgaccgcggtgaagcagatgcaagcgacgactttgaaggcgcgtatgaagaatggagtgatcatatgtggagtgacgtagcagcctactttaacctcgacattgaaaacagtgaagataataaatctactctttcacttcaatttgtcgacagcgccgcggatatgccgcttgcgaaaatgcacggtgcgttttcaacgaacgtcgtagcaagcaaagaacttcaacagccaggcagtgcacgaagcacgcgacatcttgaaattgaacttccaaaagaagcttcttatcaagaaggagatcatttaggtgttattcctcgcaactatgaaggaatagtaaaccgtgtaacagcaaggttcggcctaagcgcatcacagcaaatccgtctggaagcagaagaagaaaaattagctcatttgccactcgctaaaacagtatccgtagaagagcttctgcaatacgtggagcttcaagatcctgttacgcgcacgcagcttcgcgcaatggctgctaaaacggtctgcccgccgcataaagtagagcttgaagccttgcttgaaaagcaagcctacaaagaacaagtgctggcaaaacgtttaacaatgcttgaactgcttgaaaaatacccggcgtgtgaaatgaaattcagcgaatttatcgcccttctgccaagcatacgcccgcgctattactcgatttcttcatcacctcgtgtcgatgaaaaacaagcaagcatcacggtcagcgttgtctcaggaccggcgtggagcggatatggagaatataaaggaattgcgtcgaactatcttgccgagctgcaagaaggagatacgattacgtgctttatttccacagatcagtcagaatttacgctgccaaaagaccctgaaacgccgcttatcatggtcggaccgggaacaggcgtcgcgccgtttagaggctttgtgcaggcgcgcaaacagctaaaagaacaaggacagtcacttggagaagcacatttatacttcggctgccgttcacctcatgaagactatctgtatcaagaagagcttgaaaacgcccaaagcgaaggcatcattacgcttcataccgctttttctcgcatgccaaatcagccgaaaacatacgttcagcacgtaatggaacaagacggcaagaaattgattgaacttcttgatcaaggagcgcacttctatatttgcggagacggaagccaaatggcacctgccgttgaagcaacgcttatgaaaagctatgctgacgttcaccaagtgagtgaagcagacgctcgcttatggctgcagcagctagaagaaaaaggccgatacgcaaaagacgtgtgggctggg

SEQ ID NO: 350 - protein, 1049 aa, synthetic construct
  REGION 1..1049: note = Variant of cytochrome P450
MTIKEMPQPKTFGELKNLPLLNTDKPVQALMRIADELGEIFKFEAPGSVTRFLSSQRLIKEACDERRFDKNLSQSLKFARAFLGDGLFTSWTHEPNWKKAHNILGPSFSQRAMKRYHAMMVDIAVQLVQKWERLNADEHIEVSEDMTRLTLDTIGLCGFNYRFNSFYRDQPHPFIVSVVRALDEVMNKLQRANPDDPAYDENKRQFQEDIKVMNDYVDKIIADRKARGEQSHDLLTQMLNGKDPETGEPLDDGNIRYQIITFLIAGHETTSGLLSFALYFLVKNPHVLQKVAEEAARVLVDPVPSYKQVKQLKYVGMVLNEALRLWPTGPAFSLYAKEDTVLGGEYPLTKGDEVMVLIPQLHRDKTIWGDDVEEFRPERFENPSAIPQHAFKPFGNGQRACIGQQFALHEATLVLGMMLKHFDFEDHTNYELVIGERLTLKPEGFVVKAKSKGIPLGGIPSPSTEQSAKKVRKKAENAHNTPLLVLYGSNAGTAEGTARDLADIAMSKGFAPQVATLDSHAGNLPREGAVLIVTASYNGHPPDNAKQFVDWLDQASADEVKGVRYSVFGCGDKNWAATYQKVPAFIDETLAAKGAENIADRGEADASDDFEGAYEEWSDHMWSDVAAYFNLDIENSEDNKSTLSLQFVDSAADMPLAKMHGAFSTNVVASKELQQPGSARSTRHLEIELPKEASYQEGDHLGVIPRNYEGIVNRVTARFGLSASQQIRLEAEEEKLAHLPLAKTVSVEELLQYVELQDPVTRTQLRAMAAKTVCPPHKVELEALLEKQAYKEQVLAKRLTMLELLEKYPACEMKFSEFIALLPSIRPRYYSISSSPRVDEKQASITVSVVSGPAWSGYGEYKGIASNYLAELQEGDTITCFISTDQSEFTLPKDPETPLIMVGPGTGVAPFRGFVQARKQLKEQGQSLGEAHLYFGCRSPHEDYLYQEELENAQSEGIITLHTAFSRMPNQPKTYVQHVMEQDGKKLIELLDQGAHFYICGDGSQMAPAVEATLMKSYADVHQVSEADARLWLQQLEEKGRYAKDVWAG

SEQ ID NO: 351 - DNA, 3147 bp, synthetic construct
  misc_feature 1..3147: note = Variant of cytochrome P450
  source 1..3147: mol_type = other DNA
atgacaattaaggaaatgcctcagcctaagacgtttggagaacttaaaaatttaccgttattaaacacagataaaccggttcaagctttgatgcgtattgcggatgaattaggagaaatctttaaattcgaggcgcctggtagcgtaacgcgctttttatcaagtcagcgtctaattaaagaagcatgcgatgaatcacgctttgataaaaacttaagtcaatcgctgaaatttggccgtgattttctgggagacgggttatttacaagctggacgcatgaaccgaattggaaaaaagcgcataatatcttaggcccaagctttagtcagcgtgcaatgaaacgttatcatgcgatgatggtcgatatcgccgtgcagcttgttcaaaagtgggagcgtctaaatgcagatgagcatattgaagtatcggaagacatgacacgtttaacgctggatacaattggtctttgcggcttcaactatcgctttaacagcttttaccgagatcagcctcatccatttattgtgagtgttgtgcgtgcactggatgaaatcatgaacaagctgcagcgagcaaatccagacgacccagcttatgatgaaaacaagcgccagtgtcaagtagatattaaggtgatgaacgactatgtcgataaaattattgcagatcgcaaagcaaggggtgaacaaagccatgatttattaacgcagatgctaaacggaaaagatccagaaacgggtgagccgcttgatgacgggaacattcgttatcaaattattacattcttaatcgcgggacacgaaacaacaagtggtcttttatcatttgcgctgtatttcttagtgaaaaatccacatgtattacaaaaagtagcagaagaagcagcacgagttctagtagatcctgttccaagctacaaacaagtcaaacagcttaaatatgtcggcatggtcttaaacgaagcgctgcgcttatggccaactggtcctgcgttttccctatatgcaaaagaagatacggtgcttggaggagaatatcctttaaccaaaggcgacgaagtaatggttctgattcctcagcttcaccgtgataaaacaatttggggagacgatgtggaggagttccgtccagagcgttttgaaaatccaagtgcgattccgcagcatgcgtttaaaccgtttggaaacggtcagcgtgcgtgtatcggtcagcagttcgctcttcatgaagcaacgctggtacttggtatgatgctaaaacactttgactttgaagatcatacaaactacgagctcgttattaaggaacgcttaacgttaaaacctgaaggctttgtggtaaaagcaaaatcgaaaggcattccgcttggcctgattccttcacctagcactgaacagtctgctaaaaaagtacgcaaaaaggcagaaaacgctcataatacgccgctgcttgtgctatacggttcaaatgcgggaacagctgaaggaacggcgcgtgatttagcagatattgcaatgagcaaaggatttgcaccgcaggtcgcaacgcttgattcacacgccggaaatcttccgcgcgaaggagctgtattaattgtaacggcgtcttataacggtcatccgcctgataacgcaaagcaatttgtcgactggttagaccaagcgtctgctgatgaagtaaaaggcgttcgctactccgtatttggatgcggcgataaaaactgggctgcgacgtatcaaaaagtgcctgcttttatcgatgaaacgcttgccgctaaaggggcagaaaacatcgctgaccgcggtgaagcagatgcaagcgacgactttgaaggcacgtatgaagaatggagtgatcatatgtggagtgacgtagcagcctactttaacctcgacattgaaaacagtgaagataataaatctactctttcacttcaatttgtcgacagcgccgcggatatgccgcttgcgaaaatgcacggtgcgttttcaacgaacgtcgtagcaagcaaagaacttcaacagccaggcagtgcacgaagcacgcgacatcttgaaattgaacttccaaaagaagcttcttatcaagaaggagatcatttaggtgttattcctcgcaactatgaaggaatagtaaaccgtgtaacagcaaggttcggcctaagcgcatcacagcaaatccgtctggaagcagaagaagaaaaattagctcatttgccactcgctaaaacagtatccgtagaagagcttctgcaatacgtggagcttcaagatcctgttacgcgcacgcagcttcgcgcaatggctgctaaaacggtctgcccgccgcataaagtagagcttgaagccttgcttgaaaagcaagcctacaaagaacaagtgctggcaaaacgtttaacaatgcttgaactgcttgaaaaatacccggcgtgtgaaatgaaattcagcgaatttatcgcccttctgccaagcatacgcccgcgctattactcgatttcttcatcacctcgtgtcgatgaaaaacaagcaagcatcacggtcagcgttgtctcaggaccggcgtggagcggatatggagaatataaaggaattgcgtcgaactatcttgccgagctgcaagaaggagatacgattacgtgctttatttccacagatcagtcagaatttacgctgccaaaagaccctgaaacgccgcttatcatggtcggaccgggaacaggcgtcgcgccgtttagaggctttgtgcaggcgcgcaaacagctaaaagaacaaggacagtcacttggagaagcacatttatacttcggctgccgttcacctcatgaagactatctgtatcaagaagagcttgaaaacgcccaaagcgaaggcatcattacgcttcataccgctttttctcgcatgccaaatcagccgaaaacatacgttcagcacgtaatggaacaagacggcaagaaattgattgaacttcttgatcaaggagcgcacttctatatttgcggagacggaagccaaatggcacctgccgttgaagcaacgcttatgaaaagctatgctgacgttcaccaagtgagtgaagcagacgctcgcttatggctgcagcagctagaagaaaaaggccgatacgcaaaagacgtgtgggctggg

SEQ ID NO: 352 - protein, 1049 aa, synthetic construct
  REGION 1..1049: note = Variant of cytochrome P450
MTIKEMPQPKTFGELKNLPLLNTDKPVQALMRIADELGEIFKFEAPGSVTRFLSSQRLIKEACDESRFDKNLSQSLKFGRDFLGDGLFTSWTHEPNWKKAHNILGPSFSQRAMKRYHAMMVDIAVQLVQKWERLNADEHIEVSEDMTRLTLDTIGLCGFNYRFNSFYRDQPHPFIVSVVRALDEIMNKLQRANPDDPAYDENKRQCQVDIKVMNDYVDKIIADRKARGEQSHDLLTQMLNGKDPETGEPLDDGNIRYQIITFLIAGHETTSGLLSFALYFLVKNPHVLQKVAEEAARVLVDPVPSYKQVKQLKYVGMVLNEALRLWPTGPAFSLYAKEDTVLGGEYPLTKGDEVMVLIPQLHRDKTIWGDDVEEFRPERFENPSAIPQHAFKPFGNGQRACIGQQFALHEATLVLGMMLKHFDFEDHTNYELVIKERLTLKPEGFVVKAKSKGIPLGLIPSPSTEQSAKKVRKKAENAHNTPLLVLYGSNAGTAEGTARDLADIAMSKGFAPQVATLDSHAGNLPREGAVLIVTASYNGHPPDNAKQFVDWLDQASADEVKGVRYSVFGCGDKNWAATYQKVPAFIDETLAAKGAENIADRGEADASDDFEGTYEEWSDHMWSDVAAYFNLDIENSEDNKSTLSLQFVDSAADMPLAKMHGAFSTNVVASKELQQPGSARSTRHLEIELPKEASYQEGDHLGVIPRNYEGIVNRVTARFGLSASQQIRLEAEEEKLAHLPLAKTVSVEELLQYVELQDPVTRTQLRAMAAKTVCPPHKVELEALLEKQAYKEQVLAKRLTMLELLEKYPACEMKFSEFIALLPSIRPRYYSISSSPRVDEKQASITVSVVSGPAWSGYGEYKGIASNYLAELQEGDTITCFISTDQSEFTLPKDPETPLIMVGPGTGVAPFRGFVQARKQLKEQGQSLGEAHLYFGCRSPHEDYLYQEELENAQSEGIITLHTAFSRMPNQPKTYVQHVMEQDGKKLIELLDQGAHFYICGDGSQMAPAVEATLMKSYADVHQVSEADARLWLQQLEEKGRYAKDVWAG

SEQ ID NO: 353 - DNA, 3147 bp, synthetic construct
  misc_feature 1..3147: note = Variant of cytochrome P450
  source 1..3147: mol_type = other DNA
atgacaattaaggaaatgcctcagcctaagacgtttggagaacttaaaaatttaccgttattaaacacagataaaccggttcaagctttgatgcgtattgcggatgaattaggagaaatctttaaattcgaggcgcctggtagcgtaacgcgctttttatcaagtcagcgtctaattaaagaagcatgcgatgaaagtcgctttgataaaaacttaagtcaatcgctgaaatttgcccgtgattttctgggagacgggttatttacaagctggacgcatgaaccgaattggaaaaaagcgcataatatcttaggcccaagctttagtcagcgtgcaatgaaacgttatcatgcgatgatggtcgatatcgccgtgcagcttgttcaaaagtgggagcgtctaaatgcagatgagcatattgaagtatcggaagacatgacacgtttaacgctggatacaattggtctttgcggcttcaactatcgctttaacagcttttaccgagatcagcctcatccatttattgtgagtgttgtgcgtgcactggatgaagtaatgaacaagctgcagcgagcaaatccagacgacccagcttatgatgaaaacaagcgccagtttcaagaagatatcaaggtgatgaacgactatgtcgataaaattattgcagatcgcaaagcaaggggtgaacaaagccatgatttattaacgcagatgctaaacggaaaagatccagaaacgggtgagccgcttgatgacgggaacattcgttatcaaattattacattcttaatcgcgggacacgaaacaacaagtggtcttttatcatttgcgctgtatttcttagtgaaaaatccacatgtattacaaaaagtagcagaagaagcagcacgagttctagtagatcctgttccaagctacaaacaagtcaaacagcttaaatatgtcggcatggtcttaaacgaagcgctgcgcttatggccaactggtcctgcgttttccctatatgcaaaagaagatacggtgcttggaggagaatatcctttaaccaaaggcgacgaagtaatggttctgattcctcagcttcaccgtgataaaacaatttggggagacgatgtggaggagttccgtccagagcgttttgaaaatccaagtgcgattccgcagcatgcgtttaaaccgtttggaaacggtcagcgtgcgtgtatcggtcagcagttcgctcttcatgaagcaacgctggtacttggtatgatgctaaaacactttgactttgaagatcatacaaactacgagctcgttattggcgaaaaattaacgttaaaacctgaaggctttgtggtaaaagcaaaatcgaaaggcattccgcttggcggcattccttcacctagcactgaacagtctgctaaaaaagtacgcaaaaaggcagaaaacgctcataatacgccgctgcttgtgctatacggttcaaatgcgggaacagctgaaggaacggcgcgtgatttagcagatattgcaatgagcaaaggatttgcaccgcaggtcgcaacgcttgattcacacgccggaaatcttccgcgcgaaggagctgtattaattgtaacggcgtcttataacggtcatccgcctgataacgcaaagcaatttgtcgactggttagaccaagcgtctgctgatgaagtaaaaggcgttcgctactccgtatttggatgcggcgataaaaactgggctgcgacgtatcaaaaagtgcctgcttttatcgatgaaacgcttgccgctaaaggggcagaaaacatcgctgaccgcggtgaagcagatgcaagcgacgactttgaaggcgcgtatgaagaatggagtgatcatatgtggagtgacgtagcagcctactttaacctcgacattgaaaacagtgaagataataaatctactctttcacttcaatttgtcgacagcgccgcggatatgccgcttgcgaaaatgcacggtgcgttttcaacgaacgtcgtagcaagcaaagaacttcaacagccaggcagtgcacgaagcacgcgacatcttgaaattgaacttccaaaagaagcttcttatcaagaaggagatcatttaggtgttattcctcgcaactatgaaggaatagtaaaccgtgtaacagcaaggttcggcctaagcgcatcacagcaaatccgtctggaagcagaagaagaaaaattagctcatttgccactcgctaaaacagtatccgtagaagagcttctgcaatacgtggagcttcaagatcctgttacgcgcacgcagcttcgcgcaatggctgctaaaacggtctgcccgccgcataaagtagagcttgaagccttgcttgaaaagcaagcctacaaagaacaagtgctggcaaaacgtttaacaatgcttgaactgcttgaaaaatacccggcgtgtgaaatgaaattcagcgaatttatcgcccttctgccaagcatacgcccgcgctattactcgatttcttcatcacctcgtgtcgatgaaaaacaagcaagcatcacggtcagcgttgtctcaggaccggcgtggagcggatatggagaatataaaggaattgcgtcgaactatcttgccgagctgcaagaaggagatacgattacgtgctttatttccacagatcagtcagaatttacgctgccaaaagaccctgaaacgccgcttatcatggtcggaccgggaacaggcgtcgcgccgtttagaggctttgtgcaggcgcgcaaacagctaaaagaacaaggacagtcacttggagaagcacatttatacttcggctgccgttcacctcatgaagactatctgtatcaagaagagcttgaaaacgcccaaagcgaaggcatcattacgcttcataccgctttttctcgcatgccaaatcagccgaaaacatacgttcagcacgtaatggaacaagacggcaagaaattgattgaacttcttgatcaaggagcgcacttctatatttgcggagacggaagccaaatggcacctgccgttgaagcaacgcttatgaaaagctatgctgacgttcaccaagtgagtgaagcagacgctcgcttatggctgcagcagctagaagaaaaaggccgatacgcaaaagacgtgtgggctggg

SEQ ID NO: 354 - protein, 1049 aa, synthetic construct
  REGION 1..1049: note = Variant of cytochrome P450
MTIKEMPQPKTFGELKNLPLLNTDKPVQALMRIADELGEIFKFEAPGSVTRFLSSQRLIKEACDESRFDKNLSQSLKFARDFLGDGLFTSWTHEPNWKKAHNILGPSFSQRAMKRYHAMMVDIAVQLVQKWERLNADEHIEVSEDMTRLTLDTIGLCGFNYRFNSFYRDQPHPFIVSVVRALDEVMNKLQRANPDDPAYDENKRQFQEDIKVMNDYVDKIIADRKARGEQSHDLLTQMLNGKDPETGEPLDDGNIRYQIITFLIAGHETTSGLLSFALYFLVKNPHVLQKVAEEAARVLVDPVPSYKQVKQLKYVGMVLNEALRLWPTGPAFSLYAKEDTVLGGEYPLTKGDEVMVLIPQLHRDKTIWGDDVEEFRPERFENPSAIPQHAFKPFGNGQRACIGQQFALHEATLVLGMMLKHFDFEDHTNYELVIGEKLTLKPEGFVVKAKSKGIPLGGIPSPSTEQSAKKVRKKAENAHNTPLLVLYGSNAGTAEGTARDLADIAMSKGFAPQVATLDSHAGNLPREGAVLIVTASYNGHPPDNAKQFVDWLDQASADEVKGVRYSVFGCGDKNWAATYQKVPAFIDETLAAKGAENIADRGEADASDDFEGAYEEWSDHMWSDVAAYFNLDIENSEDNKSTLSLQFVDSAADMPLAKMHGAFSTNVVASKELQQPGSARSTRHLEIELPKEASYQEGDHLGVIPRNYEGIVNRVTARFGLSASQQIRLEAEEEKLAHLPLAKTVSVEELLQYVELQDPVTRTQLRAMAAKTVCPPHKVELEALLEKQAYKEQVLAKRLTMLELLEKYPACEMKFSEFIALLPSIRPRYYSISSSPRVDEKQASITVSVVSGPAWSGYGEYKGIASNYLAELQEGDTITCFISTDQSEFTLPKDPETPLIMVGPGTGVAPFRGFVQARKQLKEQGQSLGEAHLYFGCRSPHEDYLYQEELENAQSEGIITLHTAFSRMPNQPKTYVQHVMEQDGKKLIELLDQGAHFYICGDGSQMAPAVEATLMKSYADVHQVSEADARLWLQQLEEKGRYAKDVWAG

SEQ ID NO: 355 - DNA, 3147 bp, synthetic construct
  misc_feature 1..3147: note = Variant of cytochrome P450
  source 1..3147: mol_type = other DNA
atgacaattaaggaaatgcctcagcctaagacgtttggagaacttaaaaatttaccgttattaaacacagataaaccggttcaagctttgatgcgtattgcggatgaattaggagaaatctttaaattcgaggcgcctggtagcgtaacgcgctttttatcaagtcagcgtctaattaaagaagcatgcgatgaatcacgctttgataaaaacttaagtcaatcgctgaaatttggccgtgattttctgggagacgggttatttacaagctggacgcatgaaccgaattggaaaaaagcgcataatatcttaggcccaagctttagtcagcgtgcaatgaaacgttatcatgcgatgatggtcgatatcgccgtgcagcttgttcaaaagtgggagcgtctaaatgcagatgagcatattgaagtatcggaagacatgacacgtttaacgctggatacaattggtctttgcggcttcaactatcgctttaacagcttttaccgagatcagcctcatccatttattgtgagtgttgtgcgtgcactggatgaagtaatgaacaagctgcagcgagcaaatccagacgacccagcttatgatgaaaacaagcgccagtgtcaagaagatatcaaggtgatgaacgactatgtcgataaaattattgcagatcgcaaagcaaggggtgaacaaagccatgatttattaacgcagatgctaaacggaaaagatccagaaacgggtgagccgcttgatgacgggaacattcgttatcaaattattacattcttaatcgcgggacacgaaacaacaagtggtcttttatcatttgcgctgtatttcttagtgaaaaatccacatgtattacaaaaagtagcagaagaagcagcacgagttctagtagatcctgttccaagctacaaacaagtcaaacagcttaaatatgtcggcatggtcttaaacgaagcgctgcgcttatggccaactggtcctgcgttttccctatatgcaaaagaagatacggtgcttggaggagaatatcctttaaccaaaggcgacgaagtaatggttctgattcctcagcttcaccgtgataaaacaatttggggagacgatgtggaggagttccgtccagagcgttttgaaaatccaagtgcgattccgcagcatgcgtttaaaccgtttggaaacggtcagcgtgcgtgtatcggtcagcagttcgctcttcatgaagcaacgctggtacttggtatgatgctaaaacactttgactttgaagatcatacaaactacgagctcgttattggcgaacgcttaacgttaaaacctgaaggctttgtggtaaaagcaaaatcgaaaggcattccgcttggcctgattccttcacctagcactgaacagtctgctaaaaaagtacgcaaaaaggcagaaaacgctcataatacgccgctgcttgtgctatacggttcaaatgcgggaacagctgaaggaacggcgcgtgatttagcagatattgcaatgagcaaaggatttgcaccgcaggtcgcaacgcttgattcacacgccggaaatcttccgcgcgaaggagctgtattaattgtaacggcgtcttataacggtcatccgcctgataacgcaaagcaatttgtcgactggttagaccaagcgtctgctgatgaagtaaaaggcgttcgctactccgtatttggatgcggcgataaaaactgggctgcgacgtatcaaaaagtgcctgcttttatcgatgaaacgcttgccgctaaaggggcagaaaacatcgctgaccgcggtgaagcagatgcaagcgacgactttgaaggcgcgtatgaagaatggagtgatcatatgtggagtgacgtagcagcctactttaacctcgacattgaaaacagtgaagataataaatctactctttcacttcaatttgtcgacagcgccgcggatatgccgcttgcgaaaatgcacggtgcgttttcaacgaacgtcgtagcaagcaaagaacttcaacagccaggcagtgcacgaagcacgcgacatcttgaaattgaacttccaaaagaagcttcttatcaagaaggagatcatttaggtgttattcctcgcaactatgaaggaatagtaaaccgtgtaacagcaaggttcggcctaagcgcatcacagcaaatccgtctggaagcagaagaagaaaaattagctcatttgccactcgctaaaacagtatccgtagaagagcttctgcaatacgtggagcttcaagatcctgttacgcgcacgcagcttcgcgcaatggctgctaaaacggtctgcccgccgcataaagtagagcttgaagccttgcttgaaaagcaagcctacaaagaacaagtgctggcaaaacgtttaacaatgcttgaactgcttgaaaaatacccggcgtgtgaaatgaaattcagcgaatttatcgcccttctgccaagcatacgcccgcgctattactcgatttcttcatcacctcgtgtcgatgaaaaacaagcaagcatcacggtcagcgttgtctcaggaccggcgtggagcggatatggagaatataaaggaattgcgtcgaactatcttgccgagctgcaagaaggagatacgattacgtgctttatttccacagatcagtcagaatttacgctgccaaaagaccctgaaacgccgcttatcatggtcggaccgggaacaggcgtcgcgccgtttagaggctttgtgcaggcgcgcaaacagctaaaagaacaaggacagtcacttggagaagcacatttatacttcggctgccgttcacctcatgaagactatctgtatcaagaagagcttgaaaacgcccaaagcgaaggcatcattacgcttcataccgctttttctcgcatgccaaatcagccgaaaacatacgttcagcacgtaatggaacaagacggcaagaaattgattgaacttcttgatcaaggagcgcacttctatatttgcggagacggaagccaaatggcacctgccgttgaagcaacgcttatgaaaagctatgctgacgttcaccaagtgagtgaagcagacgctcgcttatggctgcagcagctagaagaaaaaggccgatacgcaaaagacgtgtgggctggg

SEQ ID NO: 356 - protein, 1049 aa, synthetic construct
  REGION 1..1049: note = Variant of cytochrome P450
MTIKEMPQPKTFGELKNLPLLNTDKPVQALMRIADELGEIFKFEAPGSVTRFLSSQRLIKEACDESRFDKNLSQSLKFGRDFLGDGLFTSWTHEPNWKKAHNILGPSFSQRAMKRYHAMMVDIAVQLVQKWERLNADEHIEVSEDMTRLTLDTIGLCGFNYRFNSFYRDQPHPFIVSVVRALDEVMNKLQRANPDDPAYDENKRQCQEDIKVMNDYVDKIIADRKARGEQSHDLLTQMLNGKDPETGEPLDDGNIRYQIITFLIAGHETTSGLLSFALYFLVKNPHVLQKVAEEAARVLVDPVPSYKQVKQLKYVGMVLNEALRLWPTGPAFSLYAKEDTVLGGEYPLTKGDEVMVLIPQLHRDKTIWGDDVEEFRPERFENPSAIPQHAFKPFGNGQRACIGQQFALHEATLVLGMMLKHFDFEDHTNYELVIGERLTLKPEGFVVKAKSKGIPLGLIPSPSTEQSAKKVRKKAENAHNTPLLVLYGSNAGTAEGTARDLADIAMSKGFAPQVATLDSHAGNLPREGAVLIVTASYNGHPPDNAKQFVDWLDQASADEVKGVRYSVFGCGDKNWAATYQKVPAFIDETLAAKGAENIADRGEADASDDFEGAYEEWSDHMWSDVAAYFNLDIENSEDNKSTLSLQFVDSAADMPLAKMHGAFSTNVVASKELQQPGSARSTRHLEIELPKEASYQEGDHLGVIPRNYEGIVNRVTARFGLSASQQIRLEAEEEKLAHLPLAKTVSVEELLQYVELQDPVTRTQLRAMAAKTVCPPHKVELEALLEKQAYKEQVLAKRLTMLELLEKYPACEMKFSEFIALLPSIRPRYYSISSSPRVDEKQASITVSVVSGPAWSGYGEYKGIASNYLAELQEGDTITCFISTDQSEFTLPKDPETPLIMVGPGTGVAPFRGFVQARKQLKEQGQSLGEAHLYFGCRSPHEDYLYQEELENAQSEGIITLHTAFSRMPNQPKTYVQHVMEQDGKKLIELLDQGAHFYICGDGSQMAPAVEATLMKSYADVHQVSEADARLWLQQLEEKGRYAKDVWAG

SEQ ID NO: 357 - DNA, 3147 bp, synthetic construct
  misc_feature 1..3147: note = Variant of cytochrome P450
  source 1..3147: mol_type = other DNA
atgacaattaaggaaatgcctcagcctaagacgtttggagaacttaaaaatttaccgttattaaacacagataaaccggttcaagctttgatgcgtattgcggatgaattaggagaaatctttaaattcgaggcgcctggtagcgtaacgcgctttttatcaagtcagcgtctaattaaagaagcatgcgatgaacgtcgctttgataaaaacttaagtcaatcgctgaaatttgcccgtgcttttctgggagacgggttatttacaagctggacgcatgaaccgaattggaaaaaagcgcataatatcttaggcccaagctttagtcagcgtgcaatgaaacgttatcatgcgatgatggtcgatatcgccgtgcagcttgttcaaaagtgggagcgtctaaatgcagatgagcatattgaagtatcggaagacatgacacgtttaacgctggatacaattggtctttgcggcttcaactatcgctttaacagcttttaccgagatcagcctcatccatttattgtgagtgtagtgcgtgcactggatgaagtaatgaacaagctgcagcgagcaaatccagacgacccagcttatgatgaaaacaagcgccagtgtcaagaagatatcaaggtgatgaacgactatgtcgataaaattattgcagatcgcaaagcaaggggtgaacaaagccatgatttattaacgcagatgctaaacggaaaagatccagaaacgggtgagccgcttgatgacgggaacattcgttatcaaattattacattcttaatcgcgggacacgaaacaacaagtggtcttttatcatttgcgctgtatttcttagtgaaaaatccacatgtattacaaaaagtagcagaagaagcagcacgagttctagtagatcctgttccaagctacaaacaagtcaaacagcttaaatatgtcggcatggtcttaaacgaagcgctgcgcttatggccaactggtcctgcgttttccctatatgcaaaagaagatacggtgcttggaggagaatatcctttaaccaaaggcgacgaagtaatggttctgattcctcagcttcaccgtgataaaacaatttggggagacgatgtggaggagttccgtccagagcgttttgaaaatccaagtgcgattccgcagcatgcgtttaaaccgtttggaaacggtcagcgtgcgtgtatcggtcagcagttcgctcttcatgaagcaacgctggtacttggtatgatgctaaaacactttgactttgaagatcatacaaactacgagctcgttattggcgaacgcttaacgttaaaacctgaaggctttgtggtaaaagcaaaatcgaaaggcattccgcttggcctgattccttcacctagcactgaacagtctgctaaaaaagtacgcaaaaaggcagaaaacgctcataatacgccgctgcttgtgctatacggttcaaatgcgggaacagctgaaggaacggcgcgtgatttagcagatattgcaatgagcaaaggatttgcaccgcaggtcgcaacgcttgattcacacgccggaaatcttccgcgcgaaggagctgtattaattgtaacggcgtcttataacggtcatccgcctgataacgcaaagcaatttgtcgactggttagaccaagcgtctgctgatgaagtaaaaggcgttcgctactccgtatttggatgcggcgataaaaactgggctgcgacgtatcaaaaagtgcctgcttttatcgatgaaacgcttgccgctaaaggggcagaaaacatcgctgaccgcggtgaagcagatgcaagcgacgactttgaaggcacgtatgaagaatggagtgatcatatgtggagtgacgtagcagcctactttaacctcgacattgaaaacagtgaagataataaatctactctttcacttcaatttgtcgacagcgccgcggatatgccgcttgcgaaaatgcacggtgcgttttcaacgaacgtcgtagcaagcaaagaacttcaacagccaggcagtgcacgaagcacgcgacatcttgaaattgaacttccaaaagaagcttcttatcaagaaggagatcatttaggtgttattcctcgcaactatgaaggaatagtaaaccgtgtaacagcaaggttcggcctaagcgcatcacagcaaatccgtctggaagcagaagaagaaaaattagctcatttgccactcgctaaaacagtatccgtagaagagcttctgcaatacgtggagcttcaagatcctgttacgcgcacgcagcttcgcgcaatggctgctaaaacggtctgcccgccgcataaagtagagcttgaagccttgcttgaaaagcaagcctacaaagaacaagtgctggcaaaacgtttaacaatgcttgaactgcttgaaaaatacccggcgtgtgaaatgaaattcagcgaatttatcgcccttctgccaagcatacgcccgcgctattactcgatttcttcatcacctcgtgtcgatgaaaaacaagcaagcatcacggtcagcgttgtctcaggaccggcgtggagcggatatggagaatataaaggaattgcgtcgaactatcttgccgagctgcaagaaggagatacgattacgtgctttatttccacagatcagtcagaatttacgctgccaaaagaccctgaaacgccgcttatcatggtcggaccgggaacaggcgtcgcgccgtttagaggctttgtgcaggcgcgcaaacagctaaaagaacaaggacagtcacttggagaagcacatttatacttcggctgccgttcacctcatgaagactatctgtatcaagaagagcttgaaaacgcccaaagcgaaggcatcattacgcttcataccgctttttctcgcatgccaaatcagccgaaaacatacgttcagcacgtaatggaacaagacggcaagaaattgattgaacttcttgatcaaggagcgcacttctatatttgcggagacggaagccaaatggcacctgccgttgaagcaacgcttatgaaaagctatgctgacgttcaccaagtgagtgaagcagacgctcgcttatggctgcagcagctagaagaaaaaggccgatacgcaaaagacgtgtgggctggg

SEQ ID NO: 358 - protein, 1049 aa, synthetic construct
  REGION 1..1049: note = Variant of cytochrome P450
MTIKEMPQPKTFGELKNLPLLNTDKPVQALMRIADELGEIFKFEAPGSVTRFLSSQRLIKEACDERRFDKNLSQSLKFARAFLGDGLFTSWTHEPNWKKAHNILGPSFSQRAMKRYHAMMVDIAVQLVQKWERLNADEHIEVSEDMTRLTLDTIGLCGFNYRFNSFYRDQPHPFIVSVVRALDEVMNKLQRANPDDPAYDENKRQCQEDIKVMNDYVDKIIADRKARGEQSHDLLTQMLNGKDPETGEPLDDGNIRYQIITFLIAGHETTSGLLSFALYFLVKNPHVLQKVAEEAARVLVDPVPSYKQVKQLKYVGMVLNEALRLWPTGPAFSLYAKEDTVLGGEYPLTKGDEVMVLIPQLHRDKTIWGDDVEEFRPERFENPSAIPQHAFKPFGNGQRACIGQQFALHEATLVLGMMLKHFDFEDHTNYELVIGERLTLKPEGFVVKAKSKGIPLGLIPSPSTEQSAKKVRKKAENAHNTPLLVLYGSNAGTAEGTARDLADIAMSKGFAPQVATLDSHAGNLPREGAVLIVTASYNGHPPDNAKQFVDWLDQASADEVKGVRYSVFGCGDKNWAATYQKVPAFIDETLAAKGAENIADRGEADASDDFEGTYEEWSDHMWSDVAAYFNLDIENSEDNKSTLSLQFVDSAADMPLAKMHGAFSTNVVASKELQQPGSARSTRHLEIELPKEASYQEGDHLGVIPRNYEGIVNRVTARFGLSASQQIRLEAEEEKLAHLPLAKTVSVEELLQYVELQDPVTRTQLRAMAAKTVCPPHKVELEALLEKQAYKEQVLAKRLTMLELLEKYPACEMKFSEFIALLPSIRPRYYSISSSPRVDEKQASITVSVVSGPAWSGYGEYKGIASNYLAELQEGDTITCFISTDQSEFTLPKDPETPLIMVGPGTGVAPFRGFVQARKQLKEQGQSLGEAHLYFGCRSPHEDYLYQEELENAQSEGIITLHTAFSRMPNQPKTYVQHVMEQDGKKLIELLDQGAHFYICGDGSQMAPAVEATLMKSYADVHQVSEADARLWLQQLEEKGRYAKDVWAG

SEQ ID NO: 359 - DNA, 3147 bp, synthetic construct
  misc_feature 1..3147: note = Variant of cytochrome P450
  source 1..3147: mol_type = other DNA
atgacaattaaggaaatgcctcagcctaagacgtttggagaacttaaaaatttaccgttattaaacacagataaaccggttcaagctttgatgcgtattgcggatgaattaggagaaatctttaaattcgaggcgcctggtagcgtaacgcgctttttatcaagtcagcgtctaattaaagaagcatgcgatgaacgtcgctttgataaaaacttaagtcaatcgctgaaatttgcccgtgattttctgggagacgggttatttacaagctggacgcatgaaccgaattggaaaaaagcgcataatatcttaggcccaagctttagtcagcgtgcaatgaaacgttatcatgcgatgatggtcgatatcgccgtgcagcttgttcaaaagtgggagcgtctaaatgcagatgagcatattgaagtatcggaagacatgacacgtttaacgctggatacaattggtctttgcggcttcaactatcgctttaacagcttttaccgagatcagcctcatccatttattgtgagtgttgtgcgtgcactggatgaactgatgaacaagctgcagcgagcaaatccagacgacccagcttatgatgaaaacaagcgccagtgtcaagaagatgccaaggtgatgaacgactatgtcgataaaattattgcagatcgcaaagcaaggggtgaacaaagccatgatttattaacgcagatgctaaacggaaaagatccagaaacgggtgagccgcttgatgacgggaacattcgttatcaaattattacattcttaatcgcgggacacgaaacaacaagtggtcttttatcatttgcgctgtatttcttagtgaaaaatccacatgtattacaaaaagtagcagaagaagcagcacgagttctagtagatcctgttccaagctacaaacaagtcaaacagcttaaatatgtcggcatggtcttaaacgaagcgctgcgcttatggccaactggtcctgcgttttccctatatgcaaaagaagatacggtgcttggaggagaatatcctttaaccaaaggcgacgaagtaatggttctgattcctcagcttcaccgtgataaaacaatttggggagacgatgtggaggagttccgtccagagcgttttgaaaatccaagtgcgattccgcagcatgcgtttaaaccgtttggaaacggtcagcgtgcgtgtatcggtcagcagttcgctcttcatgaagcaacgctggtacttggtatgatgctaaaacactttgactttgaagatcatacaaactacgagctcgttattaaggaacgcttaacgttaaaacctgaaggctttgtggtaaaagcaaaatcgaaaggcattccgcttggcctgattccttcacctagcactgaacagtctgctaaaaaagtacgcaaaaaggcagaaaacgctcataatacgccgctgcttgtgctatacggttcaaatgcgggaacagctgaaggaacggcgcgtgatttagcagatattgcaatgagcaaaggatttgcaccgcaggtcgcaacgcttgattcacacgccggaaatcttccgcgcgaaggagctgtattaattgtaacggcgtcttataacggtcatccgcctgataacgcaaagcaatttgtcgactggttagaccaagcgtctgctgatgaagtaaaaggcgttcgctactccgtatttggatgcggcgataaaaactgggctgcgacgtatcaaaaagtgcctgcttttatcgatgaaacgcttgccgctaaaggggcagaaaacatcgctgaccgcggtgaagcagatgcaagcgacgactttgaaggcgcgtatgaagaatggagtgatcatatgtggagtgacgtagcagcctactttaacctcgacattgaaaacagtgaagataataaatctactctttcacttcaatttgtcgacagcgccgcggatatgccgcttgcgaaaatgcacggtgcgttttcaacgaacgtcgtagcaagcaaagaacttcaacagccaggcagtgcacgaagcacgcgacatcttgaaattgaacttccaaaagaagcttcttatcaagaaggagatcatttaggtgttattcctcgcaactatgaaggaatagtaaaccgtgtaacagcaaggttcggcctaagcgcatcacagcaaatccgtctggaagcagaagaagaaaaattagctcatttgccactcgctaaaacagtatccgtagaagagcttctgcaatacgtggagcttcaagatcctgttacgcgcacgcagcttcgcgcaatggctgctaaaacggtctgcccgccgcataaagtagagcttgaagccttgcttgaaaagcaagcctacaaagaacaagtgctggcaaaacgtttaacaatgcttgaactgcttgaaaaatacccggcgtgtgaaatgaaattcagcgaatttatcgcccttctgccaagcatacgcccgcgctattactcgatttcttcatcacctcgtgtcgatgaaaaacaagcaagcatcacggtcagcgttgtctcaggaccggcgtggagcggatatggagaatataaaggaattgcgtcgaactatcttgccgagctgcaagaaggagatacgattacgtgctttatttccacagatcagtcagaatttacgctgccaaaagaccctgaaacgccgcttatcatggtcggaccgggaacaggcgtcgcgccgtttagaggctttgtgcaggcgcgcaaacagctaaaagaacaaggacagtcacttggagaagcacatttatacttcggctgccgttcacctcatgaagactatctgtatcaagaagagcttgaaaacgcccaaagcgaaggcatcattacgcttcataccgctttttctcgcatgccaaatcagccgaaaacatacgttcagcacgtaatggaacaagacggcaagaaattgattgaacttcttgatcaaggagcgcacttctatatttgcggagacggaagccaaatggcacctgccgttgaagcaacgcttatgaaaagctatgctgacgttcaccaagtgagtgaagcagacgctcgcttatggctgcagcagctagaagaaaaaggccgatacgcaaaagacgtgtgggctggg

SEQ ID NO: 360 - protein, 1049 aa, synthetic construct
  REGION 1..1049: note = Variant of cytochrome P450
MTIKEMPQPKTFGELKNLPLLNTDKPVQALMRIADELGEIFKFEAPGSVTRFLSSQRLIKEACDERRFDKNLSQSLKFARDFLGDGLFTSWTHEPNWKKAHNILGPSFSQRAMKRYHAMMVDIAVQLVQKWERLNADEHIEVSEDMTRLTLDTIGLCGFNYRFNSFYRDQPHPFIVSVVRALDELMNKLQRANPDDPAYDENKRQCQEDAKVMNDYVDKIIADRKARGEQSHDLLTQMLNGKDPETGEPLDDGNIRYQIITFLIAGHETTSGLLSFALYFLVKNPHVLQKVAEEAARVLVDPVPSYKQVKQLKYVGMVLNEALRLWPTGPAFSLYAKEDTVLGGEYPLTKGDEVMVLIPQLHRDKTIWGDDVEEFRPERFENPSAIPQHAFKPFGNGQRACIGQQFALHEATLVLGMMLKHFDFEDHTNYELVIKERLTLKPEGFVVKAKSKGIPLGLIPSPSTEQSAKKVRKKAENAHNTPLLVLYGSNAGTAEGTARDLADIAMSKGFAPQVATLDSHAGNLPREGAVLIVTASYNGHPPDNAKQFVDWLDQASADEVKGVRYSVFGCGDKNWAATYQKVPAFIDETLAAKGAENIADRGEADASDDFEGAYEEWSDHMWSDVAAYFNLDIENSEDNKSTLSLQFVDSAADMPLAKMHGAFSTNVVASKELQQPGSARSTRHLEIELPKEASYQEGDHLGVIPRNYEGIVNRVTARFGLSASQQIRLEAEEEKLAHLPLAKTVSVEELLQYVELQDPVTRTQLRAMAAKTVCPPHKVELEALLEKQAYKEQVLAKRLTMLELLEKYPACEMKFSEFIALLPSIRPRYYSISSSPRVDEKQASITVSVVSGPAWSGYGEYKGIASNYLAELQEGDTITCFISTDQSEFTLPKDPETPLIMVGPGTGVAPFRGFVQARKQLKEQGQSLGEAHLYFGCRSPHEDYLYQEELENAQSEGIITLHTAFSRMPNQPKTYVQHVMEQDGKKLIELLDQGAHFYICGDGSQMAPAVEATLMKSYADVHQVSEADARLWLQQLEEKGRYAKDVWAG

SEQ ID NO: 361 - DNA, 3147 bp, synthetic construct
  misc_feature 1..3147: note = Variant of cytochrome P450
  source 1..3147: mol_type = other DNA
atgacaattaaggaaatgcctcagcctaagacgtttggagaacttaaaaatttaccgttattaaacacagataaaccggttcaagctttgatgcgtattgcggatgaattaggagaaatctttaaattcgaggcgcctggtagcgtaacgcgctttttatcaagtcagcgtctaattaaagaagcatgcgatgaacgtcgctttgataaaaacttaagtcaatcgctgaaatttgggcgtgattttctgggagacgggttatttacaagctggacgcatgaaccgaattggaaaaaagcgcataatatcttaggcccaagctttagtcagcgtgcaatgaaacgttatcatgcgatgatggtcgatatcgccgtgcagcttgttcaaaagtgggagcgtctaaatgcagatgagcatattgaagtatcggaagacatgacacgtttaacgctggatacaattggtctttgcggcttcaactatcgctttaacagcttttaccgagatcagcctcatccatttattgtgagtgttgtgcgtgcactggatgaagtaatgaacaagctgcagcgagcaaatccagacgacccagcttatgatgaaaacaagcgccagtttcaagaagatatcaaggtgatgaacgactatgtcgataaaattattgcagatcgcaaagcaaggggtgaacaaagccatgatttattaacgcagatgctaaacggaaaagatccagaaacgggtgagccgcttgatgacgggaacattcgttatcaaattattacattcttaatcgcgggacacgaaacaacaagtggtcttttatcatttgcgctgtatttcttagtgaaaaatccacatgtattacaaaaagtagcagaagaagcagcacgagttctagtagatcctgttccaagctacaaacaagtcaaacagcttaaatatgtcggcatggtcttaaacgaagcgctgcgcttatggccaactggtcctgcgttttccctatatgcaaaagaagatacggtgcttggaggagaatatcctttaaccaaaggcgacgaagtaatggttctgattcctcagcttcaccgtgataaaacaatttggggagacgatgtggaggagttccgtccagagcgttttgaaaatccaagtgcgattccgcagcatgcgtttaaaccgtttggaaacggtcagcgtgcgtgtatcggtcagcagttcgctcttcatgaagcaacgctggtacttggtatgatgctaaaacactttgactttgaagatcatacaaactacgagctcgttattaaggaacgcttaacgttaaaacctgaaggctttgtggtaaaagcaaaatcgaaaggcattccgcttggcctgattccttcacctagcactgaacagtctgctaaaaaagtacgcaaaaaggcagaaaacgctcataatacgccgctgcttgtgctatacggttcaaatgcgggaacagctgaaggaacggcgcgtgatttagcagatattgcaatgagcaaaggatttgcaccgcaggtcgcaacgcttgattcacacgccggaaatcttccgcgcgaaggagctgtattaattgtaacggcgtcttataacggtcatccgcctgataacgcaaagcaatttgtcgactggttagaccaagcgtctgctgatgaagtaaaaggcgttcgctactccgtatttggatgcggcgataaaaactgggctgcgacgtatcaaaaagtgcctgcttttatcgatgaaacgcttgccgctaaaggggcagaaaacatcgctgaccgcggtgaagcagatgcaagcgacgactttgaaggcacgtatgaagaatggagtgatcatatgtggagtgacgtagcagcctactttaacctcgacattgaaaacagtgaagataataaatctactctttcacttcaatttgtcgacagcgccgcggatatgccgcttgcgaaaatgcacggtgcgttttcaacgaacgtcgtagcaagcaaagaacttcaacagccaggcagtgcacgaagcacgcgacatcttgaaattgaacttccaaaagaagcttcttatcaagaaggagatcatttaggtgttattcctcgcaactatgaaggaatagtaaaccgtgtaacagcaaggttcggcctaagcgcatcacagcaaatccgtctggaagcagaagaagaaaaattagctcatttgccactcgctaaaacagtatccgtagaagagcttctgcaatacgtggagcttcaagatcctgttacgcgcacgcagcttcgcgcaatggctgctaaaacggtctgcccgccgcataaagtagagcttgaagccttgcttgaaaagcaagcctacaaagaacaagtgctggcaaaacgtttaacaatgcttgaactgcttgaaaaatacccggcgtgtgaaatgaaattcagcgaatttatcgcccttctgccaagcatacgcccgcgctattactcgatttcttcatcacctcgtgtcgatgaaaaacaagcaagcatcacggtcagcgttgtctcaggaccggcgtggagcggatatggagaatataaaggaattgcgtcgaactatcttgccgagctgcaagaaggagatacgattacgtgctttatttccacagatcagtcagaatttacgctgccaaaagaccctgaaacgccgcttatcatggtcggaccgggaacaggcgtcgcgccgtttagaggctttgtgcaggcgcgcaaacagctaaaagaacaaggacagtcacttggagaagcacatttatacttcggctgccgttcacctcatgaagactatctgtatcaagaagagcttgaaaacgcccaaagcgaaggcatcattacgcttcataccgctttttctcgcatgccaaatcagccgaaaacatacgttcagcacgtaatggaacaagacggcaagaaattgattgaacttcttgatcaaggagcgcacttctatatttgcggagacggaagccaaatggcacctgccgttgaagcaacgcttatgaaaagctatgctgacgttcaccaagtgagtgaagcagacgctcgcttatggctgcagcagctagaagaaaaaggccgatacgcaaaagacgtgtgggctggg

SEQ ID NO: 362 - protein, 1049 aa, synthetic construct
  REGION 1..1049: note = Variant of cytochrome P450
MTIKEMPQPKTFGELKNLPLLNTDKPVQALMRIADELGEIFKFEAPGSVTRFLSSQRLIKEACDERRFDKNLSQSLKFGRDFLGDGLFTSWTHEPNWKKAHNILGPSFSQRAMKRYHAMMVDIAVQLVQKWERLNADEHIEVSEDMTRLTLDTIGLCGFNYRFNSFYRDQPHPFIVSVVRALDEVMNKLQRANPDDPAYDENKRQFQEDIKVMNDYVDKIIADRKARGEQSHDLLTQMLNGKDPETGEPLDDGNIRYQIITFLIAGHETTSGLLSFALYFLVKNPHVLQKVAEEAARVLVDPVPSYKQVKQLKYVGMVLNEALRLWPTGPAFSLYAKEDTVLGGEYPLTKGDEVMVLIPQLHRDKTIWGDDVEEFRPERFENPSAIPQHAFKPFGNGQRACIGQQFALHEATLVLGMMLKHFDFEDHTNYELVIKERLTLKPEGFVVKAKSKGIPLGLIPSPSTEQSAKKVRKKAENAHNTPLLVLYGSNAGTAEGTARDLADIAMSKGFAPQVATLDSHAGNLPREGAVLIVTASYNGHPPDNAKQFVDWLDQASADEVKGVRYSVFGCGDKNWAATYQKVPAFIDETLAAKGAENIADRGEADASDDFEGTYEEWSDHMWSDVAAYFNLDIENSEDNKSTLSLQFVDSAADMPLAKMHGAFSTNVVASKELQQPGSARSTRHLEIELPKEASYQEGDHLGVIPRNYEGIVNRVTARFGLSASQQIRLEAEEEKLAHLPLAKTVSVEELLQYVELQDPVTRTQLRAMAAKTVCPPHKVELEALLEKQAYKEQVLAKRLTMLELLEKYPACEMKFSEFIALLPSIRPRYYSISSSPRVDEKQASITVSVVSGPAWSGYGEYKGIASNYLAELQEGDTITCFISTDQSEFTLPKDPETPLIMVGPGTGVAPFRGFVQARKQLKEQGQSLGEAHLYFGCRSPHEDYLYQEELENAQSEGIITLHTAFSRMPNQPKTYVQHVMEQDGKKLIELLDQGAHFYICGDGSQMAPAVEATLMKSYADVHQVSEADARLWLQQLEEKGRYAKDVWAG

SEQ ID NO: 363 - DNA, 3147 bp, synthetic construct
  misc_feature 1..3147: note = Variant of cytochrome P450
  source 1..3147: mol_type = other DNA
atgacaattaaggaaatgcctcagcctaagacgtttggagaacttaaaaatttaccgttattaaacacagataaaccggttcaagctttgatgcgtattgcggatgaattaggagaaatctttaaattcgaggcgcctggtagcgtaacgcgctttttatcaagtcagcgtctaattaaagaagcatgcgatgaaagtcgctttgataaaaacttaagtcaatcgctgaaatttgggcgtgattttctgggagacgggttatttacaagctggacgcatgaaccgaattggaaaaaagcgcataatatcttaggcccaagctttagtcagcgtgcaatgaaacgttatcatgcgatgatggtcgatatcgccgtgcagcttgttcaaaagtgggagcgtctaaatgcagatgagcatattgaagtatcggaagacatgacacgtttaacgctggatacaattggtctttgcggcttcaactatcgctttaacagcttttaccgagatcagcctcatccatttattgtgagtgttgtgcgtgcactggatgaaatcatgaacaagctgcagcgagcaaatccagacgacccagcttatgatgaaaacaagcgccagtgtcaagaagatattaaggtgatgaacgactatgtcgataaaattattgcagatcgcaaagcaaggggtgaacaaagccatgatttattaacgcagatgctaaacggaaaagatccagaaacgggtgagccgcttgatgacgggaacattcgttatcaaattattacattcttaatcgcgggacacgaaacaacaagtggtcttttatcatttgcgctgtatttcttagtgaaaaatccacatgtattacaaaaagtagcagaagaagcagcacgagttctagtagatcctgttccaagctacaaacaagtcaaacagcttaaatatgtcggcatggtcttaaacgaagcgctgcgcttatggccaactggtcctgcgttttccctatatgcaaaagaagatacggtgcttggaggagaatatcctttaaccaaaggcgacgaagtaatggttctgattcctcagcttcaccgtgataaaacaatttggggagacgatgtggaggagttccgtccagagcgttttgaaaatccaagtgcgattccgcagcatgcgtttaaaccgtttggaaacggtcagcgtgcgtgtatcggtcagcagttcgctcttcatgaagcaacgctggtacttggtatgatgctaaaacactttgactttgaagatcatacaaactacgagctcgttattggcgaacgcttaacgttaaaacctgaaggctttgtggtaaaagcaaaatcgaaaggcattccgcttggcggcattccttcacctagcactgaacagtctgctaaaaaagtacgcaaaaaggcagaaaacgctcataatacgccgctgcttgtgctatacggttcaaatgcgggaacagctgaaggaacggcgcgtgatttagcagatattgcaatgagcaaaggatttgcaccgcaggtcgcaacgcttgattcacacgccggaaatcttccgcgcgaaggagctgtattaattgtaacggcgtcttataacggtcatccgcctgataacgcaaagcaatttgtcgactggttagaccaagcgtctgctgatgaagtaaaaggcgttcgctactccgtatttggatgcggcgataaaaactgggctgcgacgtatcaaaaagtgcctgcttttatcgatgaaacgcttgccgctaaaggggcagaaaacatcgctgaccgcggtgaagcagatgcaagcgacgactttgaaggcacgtatgaagaatggagtgatcatatgtggagtgacgtagcagcctactttaacctcgacattgaaaacagtgaagataataaatctactctttcacttcaatttgtcgacagcgccgcggatatgccgcttgcgaaaatgcacggtgcgttttcaacgaacgtcgtagcaagcaaagaacttcaacagccaggcagtgcacgaagcacgcgacatcttgaaattgaacttccaaaagaagcttcttatcaagaaggagatcatttaggtgttattcctcgcaactatgaaggaatagtaaaccgtgtaacagcaaggttcggcctaagcgcatcacagcaaatccgtctggaagcagaagaagaaaaattagctcatttgccactcgctaaaacagtatccgtagaagagcttctgcaatacgtggagcttcaagatcctgttacgcgcacgcagcttcgcgcaatggctgctaaaacggtctgcccgccgcataaagtagagcttgaagccttgcttgaaaagcaagcctacaaagaacaagtgctggcaaaacgtttaacaatgcttgaactgcttgaaaaatacccggcgtgtgaaatgaaattcagcgaatttatcgcccttctgccaagcatacgcccgcgctattactcgatttcttcatcacctcgtgtcgatgaaaaacaagcaagcatcacggtcagcgttgtctcaggaccggcgtggagcggatatggagaatataaaggaattgcgtcgaactatcttgccgagctgcaagaaggagatacgattacgtgctttatttccacagatcagtcagaatttacgctgccaaaagaccctgaaacgccgcttatcatggtcggaccgggaacaggcgtcgcgccgtttagaggctttgtgcaggcgcgcaaacagctaaaagaacaaggacagtcacttggagaagcacatttatacttcggctgccgttcacctcatgaagactatctgtatcaagaagagcttgaaaacgcccaaagcgaaggcatcattacgcttcataccgctttttctcgcatgccaaatcagccgaaaacatacgttcagcacgtaatggaacaagacggcaagaaattgattgaacttcttgatcaaggagcgcacttctatatttgcggagacggaagccaaatggcacctgccgttgaagcaacgcttatgaaaagctatgctgacgttcaccaagtgagtgaagcagacgctcgcttatggctgcagcagctagaagaaaaaggccgatacgcaaaagacgtgtgggctggg

SEQ ID NO: 364 - protein, 1049 aa, synthetic construct
  REGION 1..1049: note = Variant of cytochrome P450
MTIKEMPQPKTFGELKNLPLLNTDKPVQALMRIADELGEIFKFEAPGSVTRFLSSQRLIKEACDESRFDKNLSQSLKFGRDFLGDGLFTSWTHEPNWKKAHNILGPSFSQRAMKRYHAMMVDIAVQLVQKWERLNADEHIEVSEDMTRLTLDTIGLCGFNYRFNSFYRDQPHPFIVSVVRALDEIMNKLQRANPDDPAYDENKRQCQEDIKVMNDYVDKIIADRKARGEQSHDLLTQMLNGKDPETGEPLDDGNIRYQIITFLIAGHETTSGLLSFALYFLVKNPHVLQKVAEEAARVLVDPVPSYKQVKQLKYVGMVLNEALRLWPTGPAFSLYAKEDTVLGGEYPLTKGDEVMVLIPQLHRDKTIWGDDVEEFRPERFENPSAIPQHAFKPFGNGQRACIGQQFALHEATLVLGMMLKHFDFEDHTNYELVIGERLTLKPEGFVVKAKSKGIPLGGIPSPSTEQSAKKVRKKAENAHNTPLLVLYGSNAGTAEGTARDLADIAMSKGFAPQVATLDSHAGNLPREGAVLIVTASYNGHPPDNAKQFVDWLDQASADEVKGVRYSVFGCGDKNWAATYQKVPAFIDETLAAKGAENIADRGEADASDDFEGTYEEWSDHMWSDVAAYFNLDIENSEDNKSTLSLQFVDSAADMPLAKMHGAFSTNVVASKELQQPGSARSTRHLEIELPKEASYQEGDHLGVIPRNYEGIVNRVTARFGLSASQQIRLEAEEEKLAHLPLAKTVSVEELLQYVELQDPVTRTQLRAMAAKTVCPPHKVELEALLEKQAYKEQVLAKRLTMLELLEKYPACEMKFSEFIALLPSIRPRYYSISSSPRVDEKQASITVSVVSGPAWSGYGEYKGIASNYLAELQEGDTITCFISTDQSEFTLPKDPETPLIMVGPGTGVAPFRGFVQARKQLKEQGQSLGEAHLYFGCRSPHEDYLYQEELENAQSEGIITLHTAFSRMPNQPKTYVQHVMEQDGKKLIELLDQGAHFYICGDGSQMAPAVEATLMKSYADVHQVSEADARLWLQQLEEKGRYAKDVWAG

SEQ ID NO: 365 - DNA, 3147 bp, synthetic construct
  misc_feature 1..3147: note = Variant of cytochrome P450
  source 1..3147: mol_type = other DNA
atgacaattaaggaaatgcctcagcctaagacgtttggagaacttaaaaatttaccgttattaaacacagataaaccggttcaagctttgatgcgtattgcggatgaattaggagaaatctttaaattcgaggcgcctggtagcgtaacgcgctttttatcaagtcagcgtctaattaaagaagcatgcgatgaatcacgctttgataaaaacttaagtcaatcgctgaaatttgggcgtgattttctgggagacgggttatttacaagctggacgcatgaaccgaattggaaaaaagcgcataatatcttaggcccaagctttagtcagcgtgcaatgaaacgttatcatgcgatgatggtcgatatcgccgtgcagcttgttcaaaagtgggagcgtctaaatgcagatgagcatattgaagtatcggaagacatgacacgtttaacgctggatacaattggtctttgcggcttcaactatcgctttaacagcttttaccgagatcagcctcatccatttattgtgagtgttgtgcgtctgctggatgaactgatgaacaagctgcagcgagcaaatccagacgacccagcttatgatgaaaacaagcgccagtgtcaagaagatatcaaggtgatgaacgactatgtcgataaaattattgcagatcgcaaagcaaggggtgaacaaagccatgatttattaacgcagatgctaaacggaaaagatccagaaacgggtgagccgcttgatgacgggaacattcgttatcaaattattacattcttaatcgcgggacacgaaacaacaagtggtcttttatcatttgcgctgtatttcttagtgaaaaatccacatgtattacaaaaagtagcagaagaagcagcacgagttctagtagatcctgttccaagctacaaacaagtcaaacagcttaaatatgtcggcatggtcttaaacgaagcgctgcgcttatggccaactggtcctgcgttttccctatatgcaaaagaagatacggtgcttggaggagaatatcctttaaccaaaggcgacgaagtaatggttctgattcctcagcttcaccgtgataaaacaatttggggagacgatgtggaggagttccgtccagagcgttttgaaaatccaagtgcgattccgcagcatgcgtttaaaccgtttggaaacggtcagcgtgcgtgtatcggtcagcagttcgctcttcatgaagcaacgctggtacttggtatgatgctaaaacactttgactttgaagatcatacaaactacgagctcgttattaaggaacgcttaacgttaaaacctgaaggctttgtggtaaaagcaaaatcgaaaggcattccgcttggcggcattccttcacctagcactgaacagtctgctaaaaaagtacgcaaaaaggcagaaaacgctcataatacgccgctgcttgtgctatacggttcaaatgcgggaacagctgaaggaacggcgcgtgatttagcagatattgcaatgagcaaaggatttgcaccgcaggtcgcaacgcttgattcacacgccggaaatcttccgcgcgaaggagctgtattaattgtaacggcgtcttataacggtcatccgcctgataacgcaaagcaatttgtcgactggttagaccaagcgtctgctgatgaagtaaaaggcgttcgctactccgtatttggatgcggcgataaaaactgggctgcgacgtatcaaaaagtgcctgcttttatcgatgaaacgcttgccgctaaaggggcagaaaacatcgctgaccgcggtgaagcagatgcaagcgacgactttgaaggcacgtatgaagaatggagtgatcatatgtggagtgacgtagcagcctactttaacctcgacattgaaaacagtgaagataataaatctactctttcacttcaatttgtcgacagcgccgcggatatgccgcttgcgaaaatgcacggtgcgttttcaacgaacgtcgtagcaagcaaagaacttcaacagccaggcagtgcacgaagcacgcgacatcttgaaattgaacttccaaaagaagcttcttatcaagaaggagatcatttaggtgttattcctcgcaactatgaaggaatagtaaaccgtgtaacagcaaggttcggcctaagcgcatcacagcaaatccgtctggaagcagaagaagaaaaattagctcatttgccactcgctaaaacagtatccgtagaagagcttctgcaatacgtggagcttcaagatcctgttacgcgcacgcagcttcgcgcaatggctgctaaaacggtctgcccgccgcataaagtagagcttgaagccttgcttgaaaagcaagcctacaaagaacaagtgctggcaaaacgtttaacaatgcttgaactgcttgaaaaatacccggcgtgtgaaatgaaattcagcgaatttatcgcccttctgccaagcatacgcccgcgctattactcgatttcttcatcacctcgtgtcgatgaaaaacaagcaagcatcacggtcagcgttgtctcaggaccggcgtggagcggatatggagaatataaaggaattgcgtcgaactatcttgccgagctgcaagaaggagatacgattacgtgctttatttccacagatcagtcagaatttacgctgccaaaagaccctgaaacgccgcttatcatggtcggaccgggaacaggcgtcgcgccgtttagaggctttgtgcaggcgcgcaaacagctaaaagaacaaggacagtcacttggagaagcacatttatacttcggctgccgttcacctcatgaagactatctgtatcaagaagagcttgaaaacgcccaaagcgaaggcatcattacgcttcataccgctttttctcgcatgccaaatcagccgaaaacatacgttcagcacgtaatggaacaagacggcaagaaattgattgaacttcttgatcaaggagcgcacttctatatttgcggagacggaagccaaatggcacctgccgttgaagcaacgcttatgaaaagctatgctgacgttcaccaagtgagtgaagcagacgctcgcttatggctgcagcagctagaagaaaaaggccgatacgcaaaagacgtgtgggctggg

SEQ ID NO: 366 - protein, 1049 aa, synthetic construct
  REGION 1..1049: note = Variant of cytochrome P450
MTIKEMPQPKTFGELKNLPLLNTDKPVQALMRIADELGEIFKFEAPGSVTRFLSSQRLIKEACDESRFDKNLSQSLKFGRDFLGDGLFTSWTHEPNWKKAHNILGPSFSQRAMKRYHAMMVDIAVQLVQKWERLNADEHIEVSEDMTRLTLDTIGLCGFNYRFNSFYRDQPHPFIVSVVRLLDELMNKLQRANPDDPAYDENKRQCQEDIKVMNDYVDKIIADRKARGEQSHDLLTQMLNGKDPETGEPLDDGNIRYQIITFLIAGHETTSGLLSFALYFLVKNPHVLQKVAEEAARVLVDPVPSYKQVKQLKYVGMVLNEALRLWPTGPAFSLYAKEDTVLGGEYPLTKGDEVMVLIPQLHRDKTIWGDDVEEFRPERFENPSAIPQHAFKPFGNGQRACIGQQFALHEATLVLGMMLKHFDFEDHTNYELVIKERLTLKPEGFVVKAKSKGIPLGGIPSPSTEQSAKKVRKKAENAHNTPLLVLYGSNAGTAEGTARDLADIAMSKGFAPQVATLDSHAGNLPREGAVLIVTASYNGHPPDNAKQFVDWLDQASADEVKGVRYSVFGCGDKNWAATYQKVPAFIDETLAAKGAENIADRGEADASDDFEGTYEEWSDHMWSDVAAYFNLDIENSEDNKSTLSLQFVDSAADMPLAKMHGAFSTNVVASKELQQPGSARSTRHLEIELPKEASYQEGDHLGVIPRNYEGIVNRVTARFGLSASQQIRLEAEEEKLAHLPLAKTVSVEELLQYVELQDPVTRTQLRAMAAKTVCPPHKVELEALLEKQAYKEQVLAKRLTMLELLEKYPACEMKFSEFIALLPSIRPRYYSISSSPRVDEKQASITVSVVSGPAWSGYGEYKGIASNYLAELQEGDTITCFISTDQSEFTLPKDPETPLIMVGPGTGVAPFRGFVQARKQLKEQGQSLGEAHLYFGCRSPHEDYLYQEELENAQSEGIITLHTAFSRMPNQPKTYVQHVMEQDGKKLIELLDQGAHFYICGDGSQMAPAVEATLMKSYADVHQVSEADARLWLQQLEEKGRYAKDVWAG

SEQ ID NO: 367 - DNA, 3147 bp, synthetic construct
  misc_feature 1..3147: note = Variant of cytochrome P450
  source 1..3147: mol_type = other DNA
atgacaattaaggaaatgcctcagcctaagacgtttggagaacttaaaaatttaccgttattaaacacagataaaccggttcaagctttgatgcgtattgcggatgaattaggagaaatctttaaattcgaggcgcctggtagcgtaacgcgctttttatcaagtcagcgtctaattaaagaagcatgcgatgaatcacgctttgataaaaacttaagtcaatcgctgaaatttgcccgtgattttctgggagacgggttatttacaagctggacgcatgaaccgaattggaaaaaagcgcataatatcttaggcccaagctttagtcagcgtgcaatgaaacgttatcatgcgatgatggtcgatatcgccgtgcagcttgttcaaaagtgggagcgtctaaatgcagatgagcatattgaagtatcggaagacatgacacgtttaacgctggatacaattggtctttgcggcttcaactatcgctttaacagcttttaccgagatcagcctcatccatttattgtgagtgttgtgcgtgcactggatgaagtaatgaacaagctgcagcgagcaaatccagacgacccagcttatgatgaaaacaagcgccagtttcaagaagatatcaaggtgatgaacgactatgtcgataaaattattgcagatcgcaaagcaaggggtgaacaaagccatgatttattaacgcagatgctaaacggaaaagatccagaaacgggtgagccgcttgatgacgggaacattcgttatcaaattattacattcttaatcgcgggacacgaaacaacaagtggtcttttatcatttgcgctgtatttcttagtgaaaaatccacatgtattacaaaaagtagcagaagaagcagcacgagttctagtagatcctgttccaagctacaaacaagtcaaacagcttaaatatgtcggcatggtcttaaacgaagcgctgcgcttatggccaactggtcctgcgttttccctatatgcaaaagaagatacggtgcttggaggagaatatcctttaaccaaaggcgacgaagtaatggttctgattcctcagcttcaccgtgataaaacaatttggggagacgatgtggaggagttccgtccagagcgttttgaaaatccaagtgcgattccgcagcatgcgtttaaaccgtttggaaacggtcagcgtgcgtgtatcggtcagcagttcgctcttcatgaagcaacgctggtacttggtatgatgctaaaacactttgactttgaagatcatacaaactacgagctcgttattaaggaaaaattaacgttaaaacctgaaggctttgtggtaaaagcaaaatcgaaaggcattccgcttggcctgattccttcacctagcactgaacagtctgctaaaaaagtacgcaaaaaggcagaaaacgctcataatacgccgctgcttgtgctatacggttcaaatgcgggaacagctgaaggaacggcgcgtgatttagcagatattgcaatgagcaaaggatttgcaccgcaggtcgcaacgcttgattcacacgccggaaatcttccgcgcgaaggagctgtattaattgtaacggcgtcttataacggtcatccgcctgataacgcaaagcaatttgtcgactggttagaccaagcgtctgctgatgaagtaaaaggcgttcgctactccgtatttggatgcggcgataaaaactgggctgcgacgtatcaaaaagtgcctgcttttatcgatgaaacgcttgccgctaaaggggcagaaaacatcgctgaccgcggtgaagcagatgcaagcgacgactttgaaggcacatatgaagaatggagtgatcatatgtggagtgacgtagcagcctactttaacctcgacattgaaaacagtgaagataataaatctactctttcacttcaatttgtcgacagcgccgcggatatgccgcttgcgaaaatgcacggtgcgttttcaacgaacgtcgtagcaagcaaagaacttcaacagccaggcagtgcacgaagcacgcgacatcttgaaattgaacttccaaaagaagcttcttatcaagaaggagatcatttaggtgttattcctcgcaactatgaaggaatagtaaaccgtgtaacagcaaggttcggcctaagcgcatcacagcaaatccgtctggaagcagaagaagaaaaattagctcatttgccactcgctaaaacagtatccgtagaagagcttctgcaatacgtggagcttcaagatcctgttacgcgcacgcagcttcgcgcaatggctgctaaaacggtctgcccgccgcataaagtagagcttgaagccttgcttgaaaagcaagcctacaaagaacaagtgctggcaaaacgtttaacaatgcttgaactgcttgaaaaatacccggcgtgtgaaatgaaattcagcgaatttatcgcccttctgccaagcatacgcccgcgctattactcgatttcttcatcacctcgtgtcgatgaaaaacaagcaagcatcacggtcagcgttgtctcaggaccggcgtggagcggatatggagaatataaaggaattgcgtcgaactatcttgccgagctgcaagaaggagatacgattacgtgctttatttccacagatcagtcagaatttacgctgccaaaagaccctgaaacgccgcttatcatggtcggaccgggaacaggcgtcgcgccgtttagaggctttgtgcaggcgcgcaaacagctaaaagaacaaggacagtcacttggagaagcacatttatacttcggctgccgttcacctcatgaagactatctgtatcaagaagagcttgaaaacgcccaaagcgaaggcatcattacgcttcataccgctttttctcgcatgccaaatcagccgaaaacatacgttcagcacgtaatggaacaagacggcaagaaattgattgaacttcttgatcaaggagcgcacttctatatttgcggagacggaagccaaatggcacctgccgttgaagcaacgcttatgaaaagctatgctgacgttcaccaagtgagtgaagcagacgctcgcttatggctgcagcagctagaagaaaaaggccgatacgcaaaagacgtgtgggctggg

SEQ ID NO: 368 - protein, 1049 aa, synthetic construct
  REGION 1..1049: note = Variant of cytochrome P450
MTIKEMPQPKTFGELKNLPLLNTDKPVQALMRIADELGEIFKFEAPGSVTRFLSSQRLIKEACDESRFDKNLSQSLKFARDFLGDGLFTSWTHEPNWKKAHNILGPSFSQRAMKRYHAMMVDIAVQLVQKWERLNADEHIEVSEDMTRLTLDTIGLCGFNYRFNSFYRDQPHPFIVSVVRALDEVMNKLQRANPDDPAYDENKRQFQEDIKVMNDYVDKIIADRKARGEQSHDLLTQMLNGKDPETGEPLDDGNIRYQIITFLIAGHETTSGLLSFALYFLVKNPHVLQKVAEEAARVLVDPVPSYKQVKQLKYVGMVLNEALRLWPTGPAFSLYAKEDTVLGGEYPLTKGDEVMVLIPQLHRDKTIWGDDVEEFRPERFENPSAIPQHAFKPFGNGQRACIGQQFALHEATLVLGMMLKHFDFEDHTNYELVIKEKLTLKPEGFVVKAKSKGIPLGLIPSPSTEQSAKKVRKKAENAHNTPLLVLYGSNAGTAEGTARDLADIAMSKGFAPQVATLDSHAGNLPREGAVLIVTASYNGHPPDNAKQFVDWLDQASADEVKGVRYSVFGCGDKNWAATYQKVPAFIDETLAAKGAENIADRGEADASDDFEGTYEEWSDHMWSDVAAYFNLDIENSEDNKSTLSLQFVDSAADMPLAKMHGAFSTNVVASKELQQPGSARSTRHLEIELPKEASYQEGDHLGVIPRNYEGIVNRVTARFGLSASQQIRLEAEEEKLAHLPLAKTVSVEELLQYVELQDPVTRTQLRAMAAKTVCPPHKVELEALLEKQAYKEQVLAKRLTMLELLEKYPACEMKFSEFIALLPSIRPRYYSISSSPRVDEKQASITVSVVSGPAWSGYGEYKGIASNYLAELQEGDTITCFISTDQSEFTLPKDPETPLIMVGPGTGVAPFRGFVQARKQLKEQGQSLGEAHLYFGCRSPHEDYLYQEELENAQSEGIITLHTAFSRMPNQPKTYVQHVMEQDGKKLIELLDQGAHFYICGDGSQMAPAVEATLMKSYADVHQVSEADARLWLQQLEEKGRYAKDVWAG

SEQ ID NO: 369 - DNA, 3147 bp, synthetic construct
  misc_feature 1..3147: note = Variant of cytochrome P450
  source 1..3147: mol_type = other DNA
atgacaattaaggaaatgcctcagcctaagacgtttggagaacttaaaaatttaccgttattaaacacagataaaccggttcaagctttgatgcgtattgcggatgaattaggagaaatctttaaattcgaggcgcctggtagcgtaacgcgctttttatcaagtcagcgtctaattaaagaagcatgcgatgaacgtcgctttgataaaaacttaagtcaatcgctgaaatttgcccgtgattttctgggagacgggttatttacaagctggacgcatgaaccgaattggaaaaaagcgcataatatcttaggcccaagctttagtcagcgtgcaatgaaacgttatcatgcgatgatggtcgatatcgccgtgcagcttgttcaaaagtgggagcgtctaaatgcagatgagcatattgaagtatcggaagacatgacacgtttaacgctggatacaattggtctttgcggcttcaactatcgctttaacagcttttaccgagatcagcctcatccatttattgtgagtgttgtgcgtgcactggatgaagtcatgaacaagctgcagcgagcaaatccagacgacccagcttatgatgaaaacaagcgccagtgtcaagaagatattaaggtgatgaacgactatgtcgataaaattattgcagatcgcaaagcaaggggtgaacaaagccatgatttattaacgcagatgctaaacggaaaagatccagaaacgggtgagccgcttgatgacgggaacattcgttatcaaattattacattcttaatcgcgggacacgaaacaacaagtggtcttttatcatttgcgctgtatttcttagtgaaaaatccacatgtattacaaaaagtagcagaagaagcagcacgagttctagtagatcctgttccaagctacaaacaagtcaaacagcttaaatatgtcggcatggtcttaaacgaagcgctgcgcttatggccaactggtcctgcgttttccctatatgcaaaagaagatacggtgcttggaggagaatatcctttaaccaaaggcgacgaagtaatggttctgattcctcagcttcaccgtgataaaacaatttggggagacgatgtggaggagttccgtccagagcgttttgaaaatccaagtgcgattccgcagcatgcgtttaaaccgtttggaaacggtcagcgtgcgtgtatcggtcagcagttcgctcttcatgaagcaacgctggtacttggtatgatgctaaaacactttgactttgaagatcatacaaactacgagctcgttattaaggaaaaattaacgttaaaacctgaaggctttgtggtaaaagcaaaatcgaaaggcattccgcttggcggcattccttcacctagcactgaacagtctgctaaaaaagtacgcaaaaaggcagaaaacgctcataatacgccgctgcttgtgctatacggttcaaatgcgggaacagctgaaggaacggcgcgtgatttagcagatattgcaatgagcaaaggatttgcaccgcaggtcgcaacgcttgattcacacgccggaaatcttccgcgcgaaggagctgtattaattgtaacggcgtcttataacggtcatccgcctgataacgcaaagcaatttgtcgactggttagaccaagcgtctgctgatgaagtaaaaggcgttcgctactccgtatttggatgcggcgataaaaactgggctgcgacgtatcaaaaagtgcctgcttttatcgatgaaacgcttgccgctaaaggggcagaaaacatcgctgaccgcggtgaagcagatgcaagcgacgactttgaaggcacgtatgaagaatggagtgatcatatgtggagtgacgtagcagcctactttaacctcgacattgaaaacagtgaagataataaatctactctttcacttcaatttgtcgacagcgccgcggatatgccgcttgcgaaaatgcacggtgcgttttcaacgaacgtcgtagcaagcaaagaacttcaacagccaggcagtgcacgaagcacgcgacatcttgaaattgaacttccaaaagaagcttcttatcaagaaggagatcatttaggtgttattcctcgcaactatgaaggaatagtaaaccgtgtaacagcaaggttcggcctaagcgcatcacagcaaatccgtctggaagcagaagaagaaaaattagctcatttgccactcgctaaaacagtatccgtagaagagcttctgcaatacgtggagcttcaagatcctgttacgcgcacgcagcttcgcgcaatggctgctaaaacggtctgcccgccgcataaagtagagcttgaagccttgcttgaaaagcaagcctacaaagaacaagtgctggcaaaacgtttaacaatgcttgaactgcttgaaaaatacccggcgtgtgaaatgaaattcagcgaatttatcgcccttctgccaagcatacgcccgcgctattactcgatttcttcatcacctcgtgtcgatgaaaaacaagcaagcatcacggtcagcgttgtctcaggaccggcgtggagcggatatggagaatataaaggaattgcgtcgaactatcttgccgagctgcaagaaggagatacgattacgtgctttatttccacagatcagtcagaatttacgctgccaaaagaccctgaaacgccgcttatcatggtcggaccgggaacaggcgtcgcgccgtttagaggctttgtgcaggcgcgcaaacagctaaaagaacaaggacagtcacttggagaagcacatttatacttcggctgccgttcacctcatgaagactatctgtatcaagaagagcttgaaaacgcccaaagcgaaggcatcattacgcttcataccgctttttctcgcatgccaaatcagccgaaaacatacgttcagcacgtaatggaacaagacggcaagaaattgattgaacttcttgatcaaggagcgcacttctatatttgcggagacggaagccaaatggcacctgccgttgaagcaacgcttatgaaaagctatgctgacgttcaccaagtgagtgaagcagacgctcgcttatggctgcagcagctagaagaaaaaggccgatacgcaaaagacgtgtgggctggg

SEQ ID NO: 370 - protein, 1049 aa, synthetic construct
  REGION 1..1049: note = Variant of cytochrome P450
MTIKEMPQPKTFGELKNLPLLNTDKPVQALMRIADELGEIFKFEAPGSVTRFLSSQRLIKEACDERRFDKNLSQSLKFARDFLGDGLFTSWTHEPNWKKAHNILGPSFSQRAMKRYHAMMVDIAVQLVQKWERLNADEHIEVSEDMTRLTLDTIGLCGFNYRFNSFYRDQPHPFIVSVVRALDEVMNKLQRANPDDPAYDENKRQCQEDIKVMNDYVDKIIADRKARGEQSHDLLTQMLNGKDPETGEPLDDGNIRYQIITFLIAGHETTSGLLSFALYFLVKNPHVLQKVAEEAARVLVDPVPSYKQVKQLKYVGMVLNEALRLWPTGPAFSLYAKEDTVLGGEYPLTKGDEVMVLIPQLHRDKTIWGDDVEEFRPERFENPSAIPQHAFKPFGNGQRACIGQQFALHEATLVLGMMLKHFDFEDHTNYELVIKEKLTLKPEGFVVKAKSKGIPLGGIPSPSTEQSAKKVRKKAENAHNTPLLVLYGSNAGTAEGTARDLADIAMSKGFAPQVATLDSHAGNLPREGAVLIVTASYNGHPPDNAKQFVDWLDQASADEVKGVRYSVFGCGDKNWAATYQKVPAFIDETLAAKGAENIADRGEADASDDFEGTYEEWSDHMWSDVAAYFNLDIENSEDNKSTLSLQFVDSAADMPLAKMHGAFSTNVVASKELQQPGSARSTRHLEIELPKEASYQEGDHLGVIPRNYEGIVNRVTARFGLSASQQIRLEAEEEKLAHLPLAKTVSVEELLQYVELQDPVTRTQLRAMAAKTVCPPHKVELEALLEKQAYKEQVLAKRLTMLELLEKYPACEMKFSEFIALLPSIRPRYYSISSSPRVDEKQASITVSVVSGPAWSGYGEYKGIASNYLAELQEGDTITCFISTDQSEFTLPKDPETPLIMVGPGTGVAPFRGFVQARKQLKEQGQSLGEAHLYFGCRSPHEDYLYQEELENAQSEGIITLHTAFSRMPNQPKTYVQHVMEQDGKKLIELLDQGAHFYICGDGSQMAPAVEATLMKSYADVHQVSEADARLWLQQLEEKGRYAKDVWAG

SEQ ID NO: 371 - DNA, 3147 bp, synthetic construct
  misc_feature 1..3147: note = Variant of cytochrome P450
  source 1..3147: mol_type = other DNA
atgacaattaaggaaatgcctcagcctaagacgtttggagaacttaaaaatttaccgttattaaacacagataaaccggttcaagctttgatgcgtattgcggatgaattaggagaaatctttaaattcgaggcgcctggtagcgtaacgcgctttttatcaagtcagcgtctaattaaagaagcatgcgatgaatcacgctttgataaaaacttaagtcaatcgctgaaatttgcccgtgattttctgggagacgggttatttacaagctggacgcatgaaccgaattggaaaaaagcgcataatatcttaggcccaagctttagtcagcgtgcaatgaaacgttatcatgcgatgatggtcgatatcgccgtgcagcttgttcaaaagtgggagcgtctaaatgcagatgagcatattgaagtatcggaagacatgacacgtttaacgctggatacaattggtctttgcggcttcaactatcgctttaacagcttttaccgagatcagcctcatccatttattgtgagtgttgtgcgtgcactggatgaagtaatgaacaagctgcagcgagcaaatccagacgacccagcttatgatgaaaacaagcgccagtttcaagaagatatcaaggtgatgaacgactatgtcgataaaattattgcagatcgcaaagcaaggggtgaacaaagccatgatttattaacgcagatgctaaacggaaaagatccagaaacgggtgagccgcttgatgacgggaacattcgttatcaaattattacattcttaatcgcgggacacgaaacaacaagtggtcttttatcatttgcgctgtatttcttagtgaaaaatccacatgtattacaaaaagtagcagaagaagcagcacgagttctagtagatcctgttccaagctacaaacaagtcaaacagcttaaatatgtcggcatggtcttaaacgaagcgctgcgcttatggccaactggtcctgcgttttccctatatgcaaaagaagatacggtgcttggaggagaatatcctttaaccaaaggcgacgaagtaatggttctgattcctcagcttcaccgtgataaaacaatttggggagacgatgtggaggagttccgtccagagcgttttgaaaatccaagtgcgattccgcagcatgcgtttaaaccgtttggaaacggtcagcgtgcgtgtatcggtcagcagttcgctcttcatgaagcaacgctggtacttggtatgatgctaaaacactttgactttgaagatcatacaaactacgagctcgttattaaggaaaaattaacgttaaaacctgaaggctttgtggtaaaagcaaaatcgaaaggcattccgcttggcctgattccttcacctagcactgaacagtctgctaaaaaagtacgcaaaaaggcagaaaacgctcataatacgccgctgcttgtgctatacggttcaaatgcgggaacagctgaaggaacggcgcgtgatttagcagatattgcaatgagcaaaggatttgcaccgcaggtcgcaacgcttgattcacacgccggaaatcttccgcgcgaaggagctgtattaattgtaacggcgtcttataacggtcatccgcctgataacgcaaagcaatttgtcgactggttagaccaagcgtctgctgatgaagtaaaaggcgttcgctactccgtatttggatgcggcgataaaaactgggctgcgacgtatcaaaaagtgcctgcttttatcgatgaaacgcttgccgctaaaggggcagaaaacatcgctgaccgcggtgaagcagatgcaagcgacgactttgaaggcgcgtatgaagaatggagtgatcatatgtggagtgacgtagcagcctactttaacctcgacattgaaaacagtgaagataataaatctactctttcacttcaatttgtcgacagcgccgcggatatgccgcttgcgaaaatgcacggtgcgttttcaacgaacgtcgtagcaagcaaagaacttcaacagccaggcagtgcacgaagcacgcgacatcttgaaattgaacttccaaaagaagcttcttatcaagaaggagatcatttaggtgttattcctcgcaactatgaaggaatagtaaaccgtgtaacagcaaggttcggcctaagcgcatcacagcaaatccgtctggaagcagaagaagaaaaattagctcatttgccactcgctaaaacagtatccgtagaagagcttctgcaatacgtggagcttcaagatcctgttacgcgcacgcagcttcgcgcaatggctgctaaaacggtctgcccgccgcataaagtagagcttgaagccttgcttgaaaagcaagcctacaaagaacaagtgctggcaaaacgtttaacaatgcttgaactgcttgaaaaatacccggcgtgtgaaatgaaattcagcgaatttatcgcccttctgccaagcatacgcccgcgctattactcgatttcttcatcacctcgtgtcgatgaaaaacaagcaagcatcacggtcagcgttgtctcaggaccggcgtggagcggatatggagaatataaaggaattgcgtcgaactatcttgccgagctgcaagaaggagatacgattacgtgctttatttccacagatcagtcagaatttacgctgccaaaagaccctgaaacgccgcttatcatggtcggaccgggaacaggcgtcgcgccgtttagaggctttgtgcaggcgcgcaaacagctaaaagaacaaggacagtcacttggagaagcacatttatacttcggctgccgttcacctcatgaagactatctgtatcaagaagagcttgaaaacgcccaaagcgaaggcatcattacgcttcataccgctttttctcgcatgccaaatcagccgaaaacatacgttcagcacgtaatggaacaagacggcaagaaattgattgaacttcttgatcaaggagcgcacttctatatttgcggagacggaagccaaatggcacctgccgttgaagcaacgcttatgaaaagctatgctgacgttcaccaagtgagtgaagcagacgctcgcttatggctgcagcagctagaagaaaaaggccgatacgcaaaagacgtgtgggctggg

SEQ ID NO: 372 - protein, 1049 aa, synthetic construct
  REGION 1..1049: note = Variant of cytochrome P450
MTIKEMPQPKTFGELKNLPLLNTDKPVQALMRIADELGEIFKFEAPGSVTRFLSSQRLIKEACDESRFDKNLSQSLKFARDFLGDGLFTSWTHEPNWKKAHNILGPSFSQRAMKRYHAMMVDIAVQLVQKWERLNADEHIEVSEDMTRLTLDTIGLCGFNYRFNSFYRDQPHPFIVSVVRALDEVMNKLQRANPDDPAYDENKRQFQEDIKVMNDYVDKIIADRKARGEQSHDLLTQMLNGKDPETGEPLDDGNIRYQIITFLIAGHETTSGLLSFALYFLVKNPHVLQKVAEEAARVLVDPVPSYKQVKQLKYVGMVLNEALRLWPTGPAFSLYAKEDTVLGGEYPLTKGDEVMVLIPQLHRDKTIWGDDVEEFRPERFENPSAIPQHAFKPFGNGQRACIGQQFALHEATLVLGMMLKHFDFEDHTNYELVIKEKLTLKPEGFVVKAKSKGIPLGLIPSPSTEQSAKKVRKKAENAHNTPLLVLYGSNAGTAEGTARDLADIAMSKGFAPQVATLDSHAGNLPREGAVLIVTASYNGHPPDNAKQFVDWLDQASADEVKGVRYSVFGCGDKNWAATYQKVPAFIDETLAAKGAENIADRGEADASDDFEGAYEEWSDHMWSDVAAYFNLDIENSEDNKSTLSLQFVDSAADMPLAKMHGAFSTNVVASKELQQPGSARSTRHLEIELPKEASYQEGDHLGVIPRNYEGIVNRVTARFGLSASQQIRLEAEEEKLAHLPLAKTVSVEELLQYVELQDPVTRTQLRAMAAKTVCPPHKVELEALLEKQAYKEQVLAKRLTMLELLEKYPACEMKFSEFIALLPSIRPRYYSISSSPRVDEKQASITVSVVSGPAWSGYGEYKGIASNYLAELQEGDTITCFISTDQSEFTLPKDPETPLIMVGPGTGVAPFRGFVQARKQLKEQGQSLGEAHLYFGCRSPHEDYLYQEELENAQSEGIITLHTAFSRMPNQPKTYVQHVMEQDGKKLIELLDQGAHFYICGDGSQMAPAVEATLMKSYADVHQVSEADARLWLQQLEEKGRYAKDVWAG

SEQ ID NO: 373 - DNA, 3147 bp, synthetic construct
  misc_feature 1..3147: note = Variant of cytochrome P450
  source 1..3147: mol_type = other DNA
atgacaattaaggaaatgcctcagcctaagacgtttggagaacttaaaaatttaccgttattaaacacagataaaccggttcaagctttgatgcgtattgcggatgaattaggagaaatctttaaattcgaggcgcctggtagcgtaacgcgctttttatcaagtcagcgtctaattaaagaagcatgcgatgaatcacgctttgataaaaacttaagtcaatcgctgaaatttgcccgtgattttctgggagacgggttatttacaagctggacgcatgaaccgaattggaaaaaagcgcataatatcttaggcccaagctttagtcagcgtgcaatgaaacgttatcatgcgatgatggtcgatatcgccgtgcagcttgttcaaaagtgggagcgtctaaatgcagatgagcatattgaagtatcggaagacatgacacgtttaacgctggatacaattggtctttgcggcttcaactatcgctttaacagcttttaccgagatcagcctcatccatttattgtgagtgttgtgcgtgcactggatgaagtaatgaacaagctgcagcgagcaaatccagacgacccagcttatgatgaaaacaagcgccagtgtcaagaagatgccaaggtgatgaacgactatgtcgataaaattattgcagatcgcaaagcaaggggtgaacaaagccatgatttattaacgcagatgctaaacggaaaagatccagaaacgggtgagccgcttgatgacgggaacattcgttatcaaattattacattcttaatcgcgggacacgaaacaacaagtggtcttttatcatttgcgctgtatttcttagtgaaaaatccacatgtattacaaaaagtagcagaagaagcagcacgagttctagtagatcctgttccaagctacaaacaagtcaaacagcttaaatatgtcggcatggtcttaaacgaagcgctgcgcttatggccaactggtcctgcgttttccctatatgcaaaagaagatacggtgcttggaggagaatatcctttaaccaaaggcgacgaagtaatggttctgattcctcagcttcaccgtgataaaacaatttggggagacgatgtggaggagttccgtccagagcgttttgaaaatccaagtgcgattccgcagcatgcgtttaaaccgtttggaaacggtcagcgtgcgtgtatcggtcagcagttcgctcttcatgaagcaacgctggtacttggtatgatgctaaaacactttgactttgaagatcatacaaactacgagctcgttattaaggaacgcttaacgttaaaacctgaaggctttgtggtaaaagcaaaatcgaaaggcattccgcttggcctgattccttcacctagcactgaacagtctgctaaaaaagtacgcaaaaaggcagaaaacgctcataatacgccgctgcttgtgctatacggttcaaatgcgggaacagctgaaggaacggcgcgtgatttagcagatattgcaatgagcaaaggatttgcaccgcaggtcgcaacgcttgattcacacgccggaaatcttccgcgcgaaggagctgtattaattgtaacggcgtcttataacggtcatccgcctgataacgcaaagcaatttgtcgactggttagaccaagcgtctgctgatgaagtaaaaggcgttcgctactccgtatttggatgcggcgataaaaactgggctgcgacgtatcaaaaagtgcctgcttttatcgatgaaacgcttgccgctaaaggggcagaaaacatcgctgaccgcggtgaagcagatgcaagcgacgactttgaaggcgcgtatgaagaatggagtgatcatatgtggagtgacgtagcagcctactttaacctcgacattgaaaacagtgaagataataaatctactctttcacttcaatttgtcgacagcgccgcggatatgccgcttgcgaaaatgcacggtgcgttttcaacgaacgtcgtagcaagcaaagaacttcaacagccaggcagtgcacgaagcacgcgacatcttgaaattgaacttccaaaagaagcttcttatcaagaaggagatcatttaggtgttattcctcgcaactatgaaggaatagtaaaccgtgtaacagcaaggttcggcctaagcgcatcacagcaaatccgtctggaagcagaagaagaaaaattagctcatttgccactcgctaaaacagtatccgtagaagagcttctgcaatacgtggagcttcaagatcctgttacgcgcacgcagcttcgcgcaatggctgctaaaacggtctgcccgccgcataaagtagagcttgaagccttgcttgaaaagcaagcctacaaagaacaagtgctggcaaaacgtttaacaatgcttgaactgcttgaaaaatacccggcgtgtgaaatgaaattcagcgaatttatcgcccttctgccaagcatacgcccgcgctattactcgatttcttcatcacctcgtgtcgatgaaaaacaagcaagcatcacggtcagcgttgtctcaggaccggcgtggagcggatatggagaatataaaggaattgcgtcgaactatcttgccgagctgcaagaaggagatacgattacgtgctttatttccacagatcagtcagaatttacgctgccaaaagaccctgaaacgccgcttatcatggtcggaccgggaacaggcgtcgcgccgtttagaggctttgtgcaggcgcgcaaacagctaaaagaacaaggacagtcacttggagaagcacatttatacttcggctgccgttcacctcatgaagactatctgtatcaagaagagcttgaaaacgcccaaagcgaaggcatcattacgcttcataccgctttttctcgcatgccaaatcagccgaaaacatacgttcagcacgtaatggaacaagacggcaagaaattgattgaacttcttgatcaaggagcgcacttctatatttgcggagacggaagccaaatggcacctgccgttgaagcaacgcttatgaaaagctatgctgacgttcaccaagtgagtgaagcagacgctcgcttatggctgcagcagctagaagaaaaaggccgatacgcaaaagacgtgtgggctggg

SEQ ID NO: 374 - protein, 1049 aa, synthetic construct
  REGION 1..1049: note = Variant of cytochrome P450
MTIKEMPQPKTFGELKNLPLLNTDKPVQALMRIADELGEIFKFEAPGSVTRFLSSQRLIKEACDESRFDKNLSQSLKFARDFLGDGLFTSWTHEPNWKKAHNILGPSFSQRAMKRYHAMMVDIAVQLVQKWERLNADEHIEVSEDMTRLTLDTIGLCGFNYRFNSFYRDQPHPFIVSVVRALDEVMNKLQRANPDDPAYDENKRQCQEDAKVMNDYVDKIIADRKARGEQSHDLLTQMLNGKDPETGEPLDDGNIRYQIITFLIAGHETTSGLLSFALYFLVKNPHVLQKVAEEAARVLVDPVPSYKQVKQLKYVGMVLNEALRLWPTGPAFSLYAKEDTVLGGEYPLTKGDEVMVLIPQLHRDKTIWGDDVEEFRPERFENPSAIPQHAFKPFGNGQRACIGQQFALHEATLVLGMMLKHFDFEDHTNYELVIKERLTLKPEGFVVKAKSKGIPLGLIPSPSTEQSAKKVRKKAENAHNTPLLVLYGSNAGTAEGTARDLADIAMSKGFAPQVATLDSHAGNLPREGAVLIVTASYNGHPPDNAKQFVDWLDQASADEVKGVRYSVFGCGDKNWAATYQKVPAFIDETLAAKGAENIADRGEADASDDFEGAYEEWSDHMWSDVAAYFNLDIENSEDNKSTLSLQFVDSAADMPLAKMHGAFSTNVVASKELQQPGSARSTRHLEIELPKEASYQEGDHLGVIPRNYEGIVNRVTARFGLSASQQIRLEAEEEKLAHLPLAKTVSVEELLQYVELQDPVTRTQLRAMAAKTVCPPHKVELEALLEKQAYKEQVLAKRLTMLELLEKYPACEMKFSEFIALLPSIRPRYYSISSSPRVDEKQASITVSVVSGPAWSGYGEYKGIASNYLAELQEGDTITCFISTDQSEFTLPKDPETPLIMVGPGTGVAPFRGFVQARKQLKEQGQSLGEAHLYFGCRSPHEDYLYQEELENAQSEGIITLHTAFSRMPNQPKTYVQHVMEQDGKKLIELLDQGAHFYICGDGSQMAPAVEATLMKSYADVHQVSEADARLWLQQLEEKGRYAKDVWAG

SEQ ID NO: 375 - DNA, 3147 bp, synthetic construct
  misc_feature 1..3147: note = Variant of cytochrome P450
  source 1..3147: mol_type = other DNA
atgacaattaaggaaatgcctcagcctaagacgtttggagaacttaaaaatttaccgttattaaacacagataaaccggttcaagctttgatgcgtattgcggatgaattaggagaaatctttaaattcgaggcgcctggtagcgtaacgcgctttttatcaagtcagcgtctaattaaagaagcatgcgatgaaagtcgctttgataaaaacttaagtcaatcgctgaaatttgcccgtgcttttctgggagacgggttatttacaagctggacgcatgaaccgaattggaaaaaagcgcataatatcttaggcccaagctttagtcagcgtgcaatgaaacgttatcatgcgatgatggtcgatatcgccgtgcagcttgttcaaaagtgggagcgtctaaatgcagatgagcatattgaagtatcggaagacatgacacgtttaacgctggatacaattggtctttgcggcttcaactatcgctttaacagcttttaccgagatcagcctcatccatttattgtggcggtagtgcgtgcactggatgaagtaatgaacaagctgcagcgagcaaatccagacgacccagcttatgatgaaaacaagcgccagtttcaagaagatatcaaggtgatgaacgactatgtcgataaaattattgcagatcgcaaagcaaggggtgaacaaagccatgatttattaacgcagatgctaaacggaaaagatccagaaacgggtgagccgcttgatgacgggaacattcgttatcaaattattacattcttaatcgcgggacacgaaacaacaagtggtcttttatcatttgcgctgtatttcttagtgaaaaatccacatgtattacaaaaagtagcagaagaagcagcacgagttctagtagatcctgttccaagctacaaacaagtcaaacagcttaaatatgtcggcatggtcttaaacgaagcgctgcgcttatggccaactggtcctgcgttttccctatatgcaaaagaagatacggtgcttggaggagaatatcctttaaccaaaggcgacgaagtaatggttctgattcctcagcttcaccgtgataaaacaatttggggagacgatgtggaggagttccgtccagagcgttttgaaaatccaagtgcgattccgcagcatgcgtttaaaccgtttggaaacggtcagcgtgcgtgtatcggtcagcagttcgctcttcatgaagcaacgctggtacttggtatgatgctaaaacactttgactttgaagatcatacaaactacgagctcgttattaaggaacgcttaacgttaaaacctgaaggctttgtggtaaaagcaaaatcgaaaggcattccgcttggcctgattccttcacctagcactgaacagtctgctaaaaaagtacgcaaaaaggcagaaaacgctcataatacgccgctgcttgtgctatacggttcaaatgcgggaacagctgaaggaacggcgcgtgatttagcagatattgcaatgagcaaaggatttgcaccgcaggtcgcaacgcttgattcacacgccggaaatcttccgcgcgaaggagctgtattaattgtaacggcgtcttataacggtcatccgcctgataacgcaaagcaatttgtcgactggttagaccaagcgtctgctgatgaagtaaaaggcgttcgctactccgtatttggatgcggcgataaaaactgggctgcgacgtatcaaaaagtgcctgcttttatcgatgaaacgcttgccgctaaaggggcagaaaacatcgctgaccgcggtgaagcagatgcaagcgacgactttgaaggcgcgtatgaagaatggagtgatcatatgtggagtgacgtagcagcctactttaacctcgacattgaaaacagtgaagataataaatctactctttcacttcaatttgtcgacagcgccgcggatatgccgcttgcgaaaatgcacggtgcgttttcaacgaacgtcgtagcaagcaaagaacttcaacagccaggcagtgcacgaagcacgcgacatcttgaaattgaacttccaaaagaagcttcttatcaagaaggagatcatttaggtgttattcctcgcaactatgaaggaatagtaaaccgtgtaacagcaaggttcggcctaagcgcatcacagcaaatccgtctggaagcagaagaagaaaaattagctcatttgccactcgctaaaacagtatccgtagaagagcttctgcaatacgtggagcttcaagatcctgttacgcgcacgcagcttcgcgcaatggctgctaaaacggtctgcccgccgcataaagtagagcttgaagccttgcttgaaaagcaagcctacaaagaacaagtgctggcaaaacgtttaacaatgcttgaactgcttgaaaaatacccggcgtgtgaaatgaaattcagcgaatttatcgcccttctgccaagcatacgcccgcgctattactcgatttcttcatcacctcgtgtcgatgaaaaacaagcaagcatcacggtcagcgttgtctcaggaccggcgtggagcggatatggagaatataaaggaattgcgtcgaactatcttgccgagctgcaagaaggagatacgattacgtgctttatttccacagatcagtcagaatttacgctgccaaaagaccctgaaacgccgcttatcatggtcggaccgggaacaggcgtcgcgccgtttagaggctttgtgcaggcgcgcaaacagctaaaagaacaaggacagtcacttggagaagcacatttatacttcggctgccgttcacctcatgaagactatctgtatcaagaagagcttgaaaacgcccaaagcgaaggcatcattacgcttcataccgctttttctcgcatgccaaatcagccgaaaacatacgttcagcacgtaatggaacaagacggcaagaaattgattgaacttcttgatcaaggagcgcacttctatatttgcggagacggaagccaaatggcacctgccgttgaagcaacgcttatgaaaagctatgctgacgttcaccaagtgagtgaagcagacgctcgcttatggctgcagcagctagaagaaaaaggccgatacgcaaaagacgtgtgggctggg

SEQ ID NO: 376 - protein, 1049 aa, synthetic construct
  REGION 1..1049: note = Variant of cytochrome P450
MTIKEMPQPKTFGELKNLPLLNTDKPVQALMRIADELGEIFKFEAPGSVTRFLSSQRLIKEACDESRFDKNLSQSLKFARAFLGDGLFTSWTHEPNWKKAHNILGPSFSQRAMKRYHAMMVDIAVQLVQKWERLNADEHIEVSEDMTRLTLDTIGLCGFNYRFNSFYRDQPHPFIVAVVRALDEVMNKLQRANPDDPAYDENKRQFQEDIKVMNDYVDKIIADRKARGEQSHDLLTQMLNGKDPETGEPLDDGNIRYQIITFLIAGHETTSGLLSFALYFLVKNPHVLQKVAEEAARVLVDPVPSYKQVKQLKYVGMVLNEALRLWPTGPAFSLYAKEDTVLGGEYPLTKGDEVMVLIPQLHRDKTIWGDDVEEFRPERFENPSAIPQHAFKPFGNGQRACIGQQFALHEATLVLGMMLKHFDFEDHTNYELVIKERLTLKPEGFVVKAKSKGIPLGLIPSPSTEQSAKKVRKKAENAHNTPLLVLYGSNAGTAEGTARDLADIAMSKGFAPQVATLDSHAGNLPREGAVLIVTASYNGHPPDNAKQFVDWLDQASADEVKGVRYSVFGCGDKNWAATYQKVPAFIDETLAAKGAENIADRGEADASDDFEGAYEEWSDHMWSDVAAYFNLDIENSEDNKSTLSLQFVDSAADMPLAKMHGAFSTNVVASKELQQPGSARSTRHLEIELPKEASYQEGDHLGVIPRNYEGIVNRVTARFGLSASQQIRLEAEEEKLAHLPLAKTVSVEELLQYVELQDPVTRTQLRAMAAKTVCPPHKVELEALLEKQAYKEQVLAKRLTMLELLEKYPACEMKFSEFIALLPSIRPRYYSISSSPRVDEKQASITVSVVSGPAWSGYGEYKGIASNYLAELQEGDTITCFISTDQSEFTLPKDPETPLIMVGPGTGVAPFRGFVQARKQLKEQGQSLGEAHLYFGCRSPHEDYLYQEELENAQSEGIITLHTAFSRMPNQPKTYVQHVMEQDGKKLIELLDQGAHFYICGDGSQMAPAVEATLMKSYADVHQVSEADARLWLQQLEEKGRYAKDVWAG

SEQ ID NO: 377 - DNA, 3147 bp, synthetic construct
  misc_feature 1..3147: note = Variant of cytochrome P450
  source 1..3147: mol_type = other DNA
atgacaattaaggaaatgcctcagcctaagacgtttggagaacttaaaaatttaccgttattaaacacagataaaccggttcaagctttgatgcgtattgcggatgaattaggagaaatctttaaattcgaggcgcctggtagcgtaacgcgctttttatcaagtcagcgtctaattaaagaagcatgcgatgaatcacgctttgataaaaacttaagtcaatcgctgaaatttgcccgtgattttctgggagacgggttatttacaagctggacgcatgaaccgaattggaaaaaagcgcataatatcttaggcccaagctttagtcagcgtgcaatgaaacgttatcatgcgatgatggtcgatatcgccgtgcagcttgttcaaaagtgggagcgtctaaatgcagatgagcatattgaagtatcggaagacatgacacgtttaacgctggatacaattggtctttgcggcttcaactatcgctttaacagcttttaccgagatcagcctcatccatttattgtgagtgttgtgcgtgcactggatgaagtaatgaacaagctgcagcgagcaaatccagacgacccagcttatgatgaaaacaagcgccagtgtcaagaagatattaaggtgatgaacgactatgtcgataaaattattgcagatcgcaaagcaaggggtgaacaaagccatgatttattaacgcagatgctaaacggaaaagatccagaaacgggtgagccgcttgatgacgggaacattcgttatcaaattattacattcttaatcgcgggacacgaaacaacaagtggtcttttatcatttgcgctgtatttcttagtgaaaaatccacatgtattacaaaaagtagcagaagaagcagcacgagttctagtagatcctgttccaagctacaaacaagtcaaacagcttaaatatgtcggcatggtcttaaacgaagcgctgcgcttatggccaactggtcctgcgttttccctatatgcaaaagaagatacggtgcttggaggagaatatcctttaaccaaaggcgacgaagtaatggttctgattcctcagcttcaccgtgataaaacaatttggggagacgatgtggaggagttccgtccagagcgttttgaaaatccaagtgcgattccgcagcatgcgtttaaaccgtttggaaacggtcagcgtgcgtgtatcggtcagcagttcgctcttcatgaagcaacgctggtacttggtatgatgctaaaacactttgactttgaagatcatacaaactacgagctcgttattggcgaaaaattaacgttaaaacctgaaggctttgtggtaaaagcaaaatcgaaaggcattccgcttggcggcattccttcacctagcactgaacagtctgctaaaaaagtacgcaaaaaggcagaaaacgctcataatacgccgctgcttgtgctatacggttcaaatgcgggaacagctgaaggaacggcgcgtgatttagcagatattgcaatgagcaaaggatttgcaccgcaggtcgcaacgcttgattcacacgccggaaatcttccgcgcgaaggagctgtattaattgtaacggcgtcttataacggtcatccgcctgataacgcaaagcaatttgtcgactggttagaccaagcgtctgctgatgaagtaaaaggcgttcgctactccgtatttggatgcggcgataaaaactgggctgcgacgtatcaaaaagtgcctgcttttatcgatgaaacgcttgccgctaaaggggcagaaaacatcgctgaccgcggtgaagcagatgcaagcgacgactttgaaggcgcgtatgaagaatggagtgatcatatgtggagtgacgtagcagcctactttaacctcgacattgaaaacagtgaagataataaatctactctttcacttcaatttgtcgacagcgccgcggatatgccgcttgcgaaaatgcacggtgcgttttcaacgaacgtcgtagcaagcaaagaacttcaacagccaggcagtgcacgaagcacgcgacatcttgaaattgaacttccaaaagaagcttcttatcaagaaggagatcatttaggtgttattcctcgcaactatgaaggaatagtaaaccgtgtaacagcaaggttcggcctaagcgcatcacagcaaatccgtctggaagcagaagaagaaaaattagctcatttgccactcgctaaaacagtatccgtagaagagcttctgcaatacgtggagcttcaagatcctgttacgcgcacgcagcttcgcgcaatggctgctaaaacggtctgcccgccgcataaagtagagcttgaagccttgcttgaaaagcaagcctacaaagaacaagtgctggcaaaacgtttaacaatgcttgaactgcttgaaaaatacccggcgtgtgaaatgaaattcagcgaatttatcgcccttctgccaagcatacgcccgcgctattactcgatttcttcatcacctcgtgtcgatgaaaaacaagcaagcatcacggtcagcgttgtctcaggaccggcgtggagcggatatggagaatataaaggaattgcgtcgaactatcttgccgagctgcaagaaggagatacgattacgtgctttatttccacagatcagtcagaatttacgctgccaaaagaccctgaaacgccgcttatcatggtcggaccgggaacaggcgtcgcgccgtttagaggctttgtgcaggcgcgcaaacagctaaaagaacaaggacagtcacttggagaagcacatttatacttcggctgccgttcacctcatgaagactatctgtatcaagaagagcttgaaaacgcccaaagcgaaggcatcattacgcttcataccgctttttctcgcatgccaaatcagccgaaaacatacgttcagcacgtaatggaacaagacggcaagaaattgattgaacttcttgatcaaggagcgcacttctatatttgcggagacggaagccaaatggcacctgccgttgaagcaacgcttatgaaaagctatgctgacgttcaccaagtgagtgaagcagacgctcgcttatggctgcagcagctagaagaaaaaggccgatacgcaaaagacgtgtgggctggg

SEQ ID NO: 378 - protein, 1049 aa, synthetic construct
  REGION 1..1049: note = Variant of cytochrome P450
MTIKEMPQPKTFGELKNLPLLNTDKPVQALMRIADELGEIFKFEAPGSVTRFLSSQRLIKEACDESRFDKNLSQSLKFARDFLGDGLFTSWTHEPNWKKAHNILGPSFSQRAMKRYHAMMVDIAVQLVQKWERLNADEHIEVSEDMTRLTLDTIGLCGFNYRFNSFYRDQPHPFIVSVVRALDEVMNKLQRANPDDPAYDENKRQCQEDIKVMNDYVDKIIADRKARGEQSHDLLTQMLNGKDPETGEPLDDGNIRYQIITFLIAGHETTSGLLSFALYFLVKNPHVLQKVAEEAARVLVDPVPSYKQVKQLKYVGMVLNEALRLWPTGPAFSLYAKEDTVLGGEYPLTKGDEVMVLIPQLHRDKTIWGDDVEEFRPERFENPSAIPQHAFKPFGNGQRACIGQQFALHEATLVLGMMLKHFDFEDHTNYELVIGEKLTLKPEGFVVKAKSKGIPLGGIPSPSTEQSAKKVRKKAENAHNTPLLVLYGSNAGTAEGTARDLADIAMSKGFAPQVATLDSHAGNLPREGAVLIVTASYNGHPPDNAKQFVDWLDQASADEVKGVRYSVFGCGDKNWAATYQKVPAFIDETLAAKGAENIADRGEADASDDFEGAYEEWSDHMWSDVAAYFNLDIENSEDNKSTLSLQFVDSAADMPLAKMHGAFSTNVVASKELQQPGSARSTRHLEIELPKEASYQEGDHLGVIPRNYEGIVNRVTARFGLSASQQIRLEAEEEKLAHLPLAKTVSVEELLQYVELQDPVTRTQLRAMAAKTVCPPHKVELEALLEKQAYKEQVLAKRLTMLELLEKYPACEMKFSEFIALLPSIRPRYYSISSSPRVDEKQASITVSVVSGPAWSGYGEYKGIASNYLAELQEGDTITCFISTDQSEFTLPKDPETPLIMVGPGTGVAPFRGFVQARKQLKEQGQSLGEAHLYFGCRSPHEDYLYQEELENAQSEGIITLHTAFSRMPNQPKTYVQHVMEQDGKKLIELLDQGAHFYICGDGSQMAPAVEATLMKSYADVHQVSEADARLWLQQLEEKGRYAKDVWAG

SEQ ID NO: 379 - DNA, 3147 bp, synthetic construct
  misc_feature 1..3147: note = Variant of cytochrome P450
  source 1..3147: mol_type = other DNA
atgacaattaaggaaatgcctcagcctaagacgtttggagaacttaaaaatttaccgttattaaacacagataaaccggttcaagctttgatgcgtattgcggatgaattaggagaaatctttaaattcgaggcgcctggtagcgtaacgcgctttttatcaagtcagcgtctaattaaagaagcatgcgatgaacgtcgctttgataaaaacttaagtcaatcgctgaaatttgcccgtgattttctgggagacgggttatttacaagctggacgcatgaaccgaattggaaaaaagcgcataatatcttaggcccaagctttagtcagcgtgcaatgaaacgttatcatgcgatgatggtcgatatcgccgtgcagcttgttcaaaagtgggagcgtctaaatgcagatgagcatattgaagtatcggaagacatgacacgtttaacgctggatacaattggtctttgcggcttcaactatcgctttaacagcttttaccgagatcagcctcatccatttattgtgagtgttgtgcgtctgctggatgaagtcatgaacaagctgcagcgagcaaatccagacgacccagcttatgatgaaaacaagcgccagtgtcaagaagatatcaaggtgatgaacgactatgtcgataaaattattgcagatcgcaaagcaaggggtgaacaaagccatgatttattaacgcagatgctaaacggaaaagatccagaaacgggtgagccgcttgatgacgggaacattcgttatcaaattattacattcttaatcgcgggacacgaaacaacaagtggtcttttatcatttgcgctgtatttcttagtgaaaaatccacatgtattacaaaaagtagcagaagaagcagcacgagttctagtagatcctgttccaagctacaaacaagtcaaacagcttaaatatgtcggcatggtcttaaacgaagcgctgcgcttatggccaactggtcctgcgttttccctatatgcaaaagaagatacggtgcttggaggagaatatcctttaaccaaaggcgacgaagtaatggttctgattcctcagcttcaccgtgataaaacaatttggggagacgatgtggaggagttccgtccagagcgttttgaaaatccaagtgcgattccgcagcatgcgtttaaaccgtttggaaacggtcagcgtgcgtgtatcggtcagcagttcgctcttcatgaagcaacgctggtacttggtatgatgctaaaacactttgactttgaagatcatacaaactacgagctcgttattaaggaaaaattaacgttaaaacctgaaggctttgtggtaaaagcaaaatcgaaaggcattccgcttggcggtattccttcacctagcactgaacagtctgctaaaaaagtacgcaaaaaggcagaaaacgctcataatacgccgctgcttgtgctatacggttcaaatgcgggaacagctgaaggaacggcgcgtgatttagcagatattgcaatgagcaaaggatttgcaccgcaggtcgcaacgcttgattcacacgccggaaatcttccgcgcgaaggagctgtattaattgtaacggcgtcttataacggtcatccgcctgataacgcaaagcaatttgtcgactggttagaccaagcgtctgctgatgaagtaaaaggcgttcgctactccgtatttggatgcggcgataaaaactgggctgcgacgtatcaaaaagtgcctgcttttatcgatgaaacgcttgccgctaaaggggcagaaaacatcgctgaccgcggtgaagcagatgcaagcgacgactttgaaggcacatatgaagaatggagtgatcatatgtggagtgacgtagcagcctactttaacctcgacattgaaaacagtgaagataataaatctactctttcacttcaatttgtcgacagcgccgcggatatgccgcttgcgaaaatgcacggtgcgttttcaacgaacgtcgtagcaagcaaagaacttcaacagccaggcagtgcacgaagcacgcgacatcttgaaattgaacttccaaaagaagcttcttatcaagaaggagatcatttaggtgttattcctcgcaactatgaaggaatagtaaaccgtgtaacagcaaggttcggcctaagcgcatcacagcaaatccgtctggaagcagaagaagaaaaattagctcatttgccactcgctaaaacagtatccgtagaagagcttctgcaatacgtggagcttcaagatcctgttacgcgcacgcagcttcgcgcaatggctgctaaaacggtctgcccgccgcataaagtagagcttgaagccttgcttgaaaagcaagcctacaaagaacaagtgctggcaaaacgtttaacaatgcttgaactgcttgaaaaatacccggcgtgtgaaatgaaattcagcgaatttatcgcccttctgccaagcatacgcccgcgctattactcgatttcttcatcacctcgtgtcgatgaaaaacaagcaagcatcacggtcagcgttgtctcaggaccggcgtggagcggatatggagaatataaaggaattgcgtcgaactatcttgccgagctgcaagaaggagatacgattacgtgctttatttccacagatcagtcagaatttacgctgccaaaagaccctgaaacgccgcttatcatggtcggaccgggaacaggcgtcgcgccgtttagaggctttgtgcaggcgcgcaaacagctaaaagaacaaggacagtcacttggagaagcacatttatacttcggctgccgttcacctcatgaagactatctgtatcaagaagagcttgaaaacgcccaaagcgaaggcatcattacgcttcataccgctttttctcgcatgccaaatcagccgaaaacatacgttcagcacgtaatggaacaagacggcaagaaattgattgaacttcttgatcaaggagcgcacttctatatttgcggagacggaagccaaatggcacctgccgttgaagcaacgcttatgaaaagctatgctgacgttcaccaagtgagtgaagcagacgctcgcttatggctgcagcagctagaagaaaaaggccgatacgcaaaagacgtgtgggctggg

SEQ ID NO: 380 - protein, 1049 aa, synthetic construct
  REGION 1..1049: note = Variant of cytochrome P450
MTIKEMPQPKTFGELKNLPLLNTDKPVQALMRIADELGEIFKFEAPGSVTRFLSSQRLIKEACDERRFDKNLSQSLKFARDFLGDGLFTSWTHEPNWKKAHNILGPSFSQRAMKRYHAMMVDIAVQLVQKWERLNADEHIEVSEDMTRLTLDTIGLCGFNYRFNSFYRDQPHPFIVSVVRLLDEVMNKLQRANPDDPAYDENKRQCQEDIKVMNDYVDKIIADRKARGEQSHDLLTQMLNGKDPETGEPLDDGNIRYQIITFLIAGHETTSGLLSFALYFLVKNPHVLQKVAEEAARVLVDPVPSYKQVKQLKYVGMVLNEALRLWPTGPAFSLYAKEDTVLGGEYPLTKGDEVMVLIPQLHRDKTIWGDDVEEFRPERFENPSAIPQHAFKPFGNGQRACIGQQFALHEATLVLGMMLKHFDFEDHTNYELVIKEKLTLKPEGFVVKAKSKGIPLGGIPSPSTEQSAKKVRKKAENAHNTPLLVLYGSNAGTAEGTARDLADIAMSKGFAPQVATLDSHAGNLPREGAVLIVTASYNGHPPDNAKQFVDWLDQASADEVKGVRYSVFGCGDKNWAATYQKVPAFIDETLAAKGAENIADRGEADASDDFEGTYEEWSDHMWSDVAAYFNLDIENSEDNKSTLSLQFVDSAADMPLAKMHGAFSTNVVASKELQQPGSARSTRHLEIELPKEASYQEGDHLGVIPRNYEGIVNRVTARFGLSASQQIRLEAEEEKLAHLPLAKTVSVEELLQYVELQDPVTRTQLRAMAAKTVCPPHKVELEALLEKQAYKEQVLAKRLTMLELLEKYPACEMKFSEFIALLPSIRPRYYSISSSPRVDEKQASITVSVVSGPAWSGYGEYKGIASNYLAELQEGDTITCFISTDQSEFTLPKDPETPLIMVGPGTGVAPFRGFVQARKQLKEQGQSLGEAHLYFGCRSPHEDYLYQEELENAQSEGIITLHTAFSRMPNQPKTYVQHVMEQDGKKLIELLDQGAHFYICGDGSQMAPAVEATLMKSYADVHQVSEADARLWLQQLEEKGRYAKDVWAG

SEQ ID NO: 381 - DNA, 3147 bp, synthetic construct
  misc_feature 1..3147: note = Variant of cytochrome P450
  source 1..3147: mol_type = other DNA
atgacaattaaggaaatgcctcagcctaagacgtttggagaacttaaaaatttaccgttattaaacacagataaaccggttcaagctttgatgcgtattgcggatgaattaggagaaatctttaaattcgaggcgcctggtagcgtaacgcgctttttatcaagtcagcgtctaattaaagaagcatgcgatgaacgtcgctttgataaaaacttaagtcaatcgctgaaatttgcccgtgattttctgggagacgggttatttacaagctggacgcatgaaccgaattggaaaaaagcgcataatatcttaggcccaagctttagtcagcgtgcaatgaaacgttatcatgcgatgatggtcgatatcgccgtgcagcttgttcaaaagtgggagcgtctaaatgcagatgagcatattgaagtatcggaagacatgacacgtttaacgctggatacaattggtctttgcggcttcaactatcgctttaacagcttttaccgagatcagcctcatccatttattgtgagtgttgtgcgtgcactggatgaagtaatgaacaagctgcagcgagcaaatccagacgacccagcttatgatgaaaacaagcgccagtttcaagaagatatcaaggtgatgaacgactatgtcgataaaattattgcagatcgcaaagcaaggggtgaacaaagccatgatttattaacgcagatgctaaacggaaaagatccagaaacgggtgagccgcttgatgacgggaacattcgttatcaaattattacattcttaatcgcgggacacgaaacaacaagtggtcttttatcatttgcgctgtatttcttagtgaaaaatccacatgtattacaaaaagtagcagaagaagcagcacgagttctagtagatcctgttccaagctacaaacaagtcaaacagcttaaatatgtcggcatggtcttaaacgaagcgctgcgcttatggccaactggtcctgcgttttccctatatgcaaaagaagatacggtgcttggaggagaatatcctttaaccaaaggcgacgaagtaatggttctgattcctcagcttcaccgtgataaaacaatttggggagacgatgtggaggagttccgtccagagcgttttgaaaatccaagtgcgattccgcagcatgcgtttaaaccgtttggaaacggtcagcgtgcgtgtatcggtcagcagttcgctcttcatgaagcaacgctggtacttggtatgatgctaaaacactttgactttgaagatcatacaaactacgagctcgttattggcgaacgcttaacgttaaaacctgaaggctttgtggtaaaagcaaaatcgaaaggcattccgcttggcggcattccttcacctagcactgaacagtctgctaaaaaagtacgcaaaaaggcagaaaacgctcataatacgccgctgcttgtgctatacggttcaaatgcgggaacagctgaaggaacggcgcgtgatttagcagatattgcaatgagcaaaggatttgcaccgcaggtcgcaacgcttgattcacacgccggaaatcttccgcgcgaaggagctgtattaattgtaacggcgtcttataacggtcatccgcctgataacgcaaagcaatttgtcgactggttagaccaagcgtctgctgatgaagtaaaaggcgttcgctactccgtatttggatgcggcgataaaaactgggctgcgacgtatcaaaaagtgcctgcttttatcgatgaaacgcttgccgctaaaggggcagaaaacatcgctgaccgcggtgaagcagatgcaagcgacgactttgaaggcacgtatgaagaatggagtgatcatatgtggagtgacgtagcagcctactttaacctcgacattgaaaacagtgaagataataaatctactctttcacttcaatttgtcgacagcgccgcggatatgccgcttgcgaaaatgcacggtgcgttttcaacgaacgtcgtagcaagcaaagaacttcaacagccaggcagtgcacgaagcacgcgacatcttgaaattgaacttccaaaagaagcttcttatcaagaaggagatcatttaggtgttattcctcgcaactatgaaggaatagtaaaccgtgtaacagcaaggttcggcctaagcgcatcacagcaaatccgtctggaagcagaagaagaaaaattagctcatttgccactcgctaaaacagtatccgtagaagagcttctgcaatacgtggagcttcaagatcctgttacgcgcacgcagcttcgcgcaatggctgctaaaacggtctgcccgccgcataaagtagagcttgaagccttgcttgaaaagcaagcctacaaagaacaagtgctggcaaaacgtttaacaatgcttgaactgcttgaaaaatacccggcgtgtgaaatgaaattcagcgaatttatcgcccttctgccaagcatacgcccgcgctattactcgatttcttcatcacctcgtgtcgatgaaaaacaagcaagcatcacggtcagcgttgtctcaggaccggcgtggagcggatatggagaatataaaggaattgcgtcgaactatcttgccgagctgcaagaaggagatacgattacgtgctttatttccacagatcagtcagaatttacgctgccaaaagaccctgaaacgccgcttatcatggtcggaccgggaacaggcgtcgcgccgtttagaggctttgtgcaggcgcgcaaacagctaaaagaacaaggacagtcacttggagaagcacatttatacttcggctgccgttcacctcatgaagactatctgtatcaagaagagcttgaaaacgcccaaagcgaaggcatcattacgcttcataccgctttttctcgcatgccaaatcagccgaaaacatacgttcagcacgtaatggaacaagacggcaagaaattgattgaacttcttgatcaaggagcgcacttctatatttgcggagacggaagccaaatggcacctgccgttgaagcaacgcttatgaaaagctatgctgacgttcaccaagtgagtgaagcagacgctcgcttatggctgcagcagctagaagaaaaaggccgatacgcaaaagacgtgtgggctggg

SEQ ID NO: 382 - protein, 1049 aa, synthetic construct
  REGION 1..1049: note = Variant of cytochrome P450
MTIKEMPQPKTFGELKNLPLLNTDKPVQALMRIADELGEIFKFEAPGSVTRFLSSQRLIKEACDERRFDKNLSQSLKFARDFLGDGLFTSWTHEPNWKKAHNILGPSFSQRAMKRYHAMMVDIAVQLVQKWERLNADEHIEVSEDMTRLTLDTIGLCGFNYRFNSFYRDQPHPFIVSVVRALDEVMNKLQRANPDDPAYDENKRQFQEDIKVMNDYVDKIIADRKARGEQSHDLLTQMLNGKDPETGEPLDDGNIRYQIITFLIAGHETTSGLLSFALYFLVKNPHVLQKVAEEAARVLVDPVPSYKQVKQLKYVGMVLNEALRLWPTGPAFSLYAKEDTVLGGEYPLTKGDEVMVLIPQLHRDKTIWGDDVEEFRPERFENPSAIPQHAFKPFGNGQRACIGQQFALHEATLVLGMMLKHFDFEDHTNYELVIGERLTLKPEGFVVKAKSKGIPLGGIPSPSTEQSAKKVRKKAENAHNTPLLVLYGSNAGTAEGTARDLADIAMSKGFAPQVATLDSHAGNLPREGAVLIVTASYNGHPPDNAKQFVDWLDQASADEVKGVRYSVFGCGDKNWAATYQKVPAFIDETLAAKGAENIADRGEADASDDFEGTYEEWSDHMWSDVAAYFNLDIENSEDNKSTLSLQFVDSAADMPLAKMHGAFSTNVVASKELQQPGSARSTRHLEIELPKEASYQEGDHLGVIPRNYEGIVNRVTARFGLSASQQIRLEAEEEKLAHLPLAKTVSVEELLQYVELQDPVTRTQLRAMAAKTVCPPHKVELEALLEKQAYKEQVLAKRLTMLELLEKYPACEMKFSEFIALLPSIRPRYYSISSSPRVDEKQASITVSVVSGPAWSGYGEYKGIASNYLAELQEGDTITCFISTDQSEFTLPKDPETPLIMVGPGTGVAPFRGFVQARKQLKEQGQSLGEAHLYFGCRSPHEDYLYQEELENAQSEGIITLHTAFSRMPNQPKTYVQHVMEQDGKKLIELLDQGAHFYICGDGSQMAPAVEATLMKSYADVHQVSEADARLWLQQLEEKGRYAKDVWAG

SEQ ID NO: 383 - DNA, 3147 bp, synthetic construct
  misc_feature 1..3147: note = Variant of cytochrome P450
  source 1..3147: mol_type = other DNA
atgacaattaaggaaatgcctcagcctaagacgtttggagaacttaaaaatttaccgttattaaacacagataaaccggttcaagctttgatgcgtattgcggatgaattaggagaaatctttaaattcgaggcgcctggtagcgtaacgcgctttttatcaagtcagcgtctaattaaagaagcatgcgatgaacgtcgctttgataaaaacttaagtcaatcgctgaaatttgcccgtgcttttctgggagacgggttattcacaagctggacgcatgaaccgaattggaaaaaagcgcataatatcttaggcccaagctttagtcagcgtgcaatgaaacgttatcatgcgatgatggtcgatatcgccgtgcagcttgttcaaaagtgggagcgtctaaatgcagatgagcatattgaagtatcggaagacatgacacgtttaacgctggatacaattggtctttgcggcttcaactatcgctttaacagcttttaccgagatcagcctcatccatttattgtgagtgttgtgcgtgcactggatgaaatcatgaacaagctgcagcgagcaaatccagacgacccagcttatgatgaaaacaagcgccagtgtcaagaagatattaaggtgatgaacgactatgtcgataaaattattgcagatcgcaaagcaaggggtgaacaaagccatgatttattaacgcagatgctaaacggaaaagatccagaaacgggtgagccgcttgatgacgggaacattcgttatcaaattattacattcttaatcgcgggacacgaaacaacaagtggtcttttatcatttgcgctgtatttcttagtgaaaaatccacatgtattacaaaaagtagcagaagaagcagcacgagttctagtagatcctgttccaagctacaaacaagtcaaacagcttaaatatgtcggcatggtcttaaacgaagcgctgcgcttatggccaactggtcctgcgttttccctatatgcaaaagaagatacggtgcttggaggagaatatcctttaaccaaaggcgacgaagtaatggttctgattcctcagcttcaccgtgataaaacaatttggggagacgatgtggaggagttccgtccagagcgttttgaaaatccaagtgcgattccgcagcatgcgtttaaaccgtttggaaacggtcagcgtgcgtgtatcggtcagcagttcgctcttcatgaagcaacgctggtacttggtatgatgctaaaacactttgactttgaagatcatacaaactacgagctcgttattggcgaacgcttaacgttaaaacctgaaggctttgtggtaaaagcaaaatcgaaaggcattccgcttggcctgattccttcacctagcactgaacagtctgctaaaaaagtacgcaaaaaggcagaaaacgctcataatacgccgctgcttgtgctatacggttcaaatgcgggaacagctgaaggaacggcgcgtgatttagcagatattgcaatgagcaaaggatttgcaccgcaggtcgcaacgcttgattcacacgccggaaatcttccgcgcgaaggagctgtattaattgtaacggcgtcttataacggtcatccgcctgataacgcaaagcaatttgtcgactggttagaccaagcgtctgctgatgaagtaaaaggcgttcgctactccgtatttggatgcggcgataaaaactgggctgcgacgtatcaaaaagtgcctgcttttatcgatgaaacgcttgccgctaaaggggcagaaaacatcgctgaccgcggtgaagcagatgcaagcgacgactttgaaggcacgtatgaagaatggagtgatcatatgtggagtgacgtagcagcctactttaacctcgacattgaaaacagtgaagataataaatctactctttcacttcaatttgtcgacagcgccgcggatatgccgcttgcgaaaatgcacggtgcgttttcaacgaacgtcgtagcaagcaaagaacttcaacagccaggcagtgcacgaagcacgcgacatcttgaaattgaacttccaaaagaagcttcttatcaagaaggagatcatttaggtgttattcctcgcaactatgaaggaatagtaaaccgtgtaacagcaaggttcggcctaagcgcatcacagcaaatccgtctggaagcagaagaagaaaaattagctcatttgccactcgctaaaacagtatccgtagaagagcttctgcaatacgtggagcttcaagatcctgttacgcgcacgcagcttcgcgcaatggctgctaaaacggtctgcccgccgcataaagtagagcttgaagccttgcttgaaaagcaagcctacaaagaacaagtgctggcaaaacgtttaacaatgcttgaactgcttgaaaaatacccggcgtgtgaaatgaaattcagcgaatttatcgcccttctgccaagcatacgcccgcgctattactcgatttcttcatcacctcgtgtcgatgaaaaacaagcaagcatcacggtcagcgttgtctcaggaccggcgtggagcggatatggagaatataaaggaattgcgtcgaactatcttgccgagctgcaagaaggagatacgattacgtgctttatttccacagatcagtcagaatttacgctgccaaaagaccctgaaacgccgcttatcatggtcggaccgggaacaggcgtcgcgccgtttagaggctttgtgcaggcgcgcaaacagctaaaagaacaaggacagtcacttggagaagcacatttatacttcggctgccgttcacctcatgaagactatctgtatcaagaagagcttgaaaacgcccaaagcgaaggcatcattacgcttcataccgctttttctcgcatgccaaatcagccgaaaacatacgttcagcacgtaatggaacaagacggcaagaaattgattgaacttcttgatcaaggagcgcacttctatatttgcggagacggaagccaaatggcacctgccgttgaagcaacgcttatgaaaagctatgctgacgttcaccaagtgagtgaagcagacgctcgcttatggctgcagcagctagaagaaaaaggccgatacgcaaaagacgtgtgggctggg

SEQ ID NO: 384 - protein, 1049 aa, synthetic construct
  REGION 1..1049: note = Variant of cytochrome P450
MTIKEMPQPKTFGELKNLPLLNTDKPVQALMRIADELGEIFKFEAPGSVTRFLSSQRLIKEACDERRFDKNLSQSLKFARAFLGDGLFTSWTHEPNWKKAHNILGPSFSQRAMKRYHAMMVDIAVQLVQKWERLNADEHIEVSEDMTRLTLDTIGLCGFNYRFNSFYRDQPHPFIVSVVRALDEIMNKLQRANPDDPAYDENKRQCQEDIKVMNDYVDKIIADRKARGEQSHDLLTQMLNGKDPETGEPLDDGNIRYQIITFLIAGHETTSGLLSFALYFLVKNPHVLQKVAEEAARVLVDPVPSYKQVKQLKYVGMVLNEALRLWPTGPAFSLYAKEDTVLGGEYPLTKGDEVMVLIPQLHRDKTIWGDDVEEFRPERFENPSAIPQHAFKPFGNGQRACIGQQFALHEATLVLGMMLKHFDFEDHTNYELVIGERLTLKPEGFVVKAKSKGIPLGLIPSPSTEQSAKKVRKKAENAHNTPLLVLYGSNAGTAEGTARDLADIAMSKGFAPQVATLDSHAGNLPREGAVLIVTASYNGHPPDNAKQFVDWLDQASADEVKGVRYSVFGCGDKNWAATYQKVPAFIDETLAAKGAENIADRGEADASDDFEGTYEEWSDHMWSDVAAYFNLDIENSEDNKSTLSLQFVDSAADMPLAKMHGAFSTNVVASKELQQPGSARSTRHLEIELPKEASYQEGDHLGVIPRNYEGIVNRVTARFGLSASQQIRLEAEEEKLAHLPLAKTVSVEELLQYVELQDPVTRTQLRAMAAKTVCPPHKVELEALLEKQAYKEQVLAKRLTMLELLEKYPACEMKFSEFIALLPSIRPRYYSISSSPRVDEKQASITVSVVSGPAWSGYGEYKGIASNYLAELQEGDTITCFISTDQSEFTLPKDPETPLIMVGPGTGVAPFRGFVQARKQLKEQGQSLGEAHLYFGCRSPHEDYLYQEELENAQSEGIITLHTAFSRMPNQPKTYVQHVMEQDGKKLIELLDQGAHFYICGDGSQMAPAVEATLMKSYADVHQVSEADARLWLQQLEEKGRYAKDVWAG

SEQ ID NO: 385 - DNA, 3147 bp, synthetic construct
  misc_feature 1..3147: note = Variant of cytochrome P450
  source 1..3147: mol_type = other DNA
atgacaattaaggaaatgcctcagcctaagacgtttggagaacttaaaaatttaccgttattaaacacagataaaccggttcaagctttgatgcgtattgcggatgaattaggagaaatctttaaattcgaggcgcctggtagcgtaacgcgctttttatcaagtcagcgtctaattaaagaagcatgcgatgaacgtcgctttgataaaaacttaagtcaatcgctgaaatttgcccgtgattttctgggagacgggttatttacaagctggacgcatgaaccgaattggaaaaaagcgcataatatcttaggcccaagctttagtcagcgtgcaatgaaacgttatcatgcgatgatggtcgatatcgccgtgcagcttgttcaaaagtgggagcgtctaaatgcagatgagcatattgaagtatcggaagacatgacacgtttaacgctggatacaattggtctttgcggcttcaactatcgctttaacagcttttaccgagatcagcctcatccatttattgtgagtgttgtgcgtgcactggatgaagtaatgaacaagctgcagcgagcaaatccagacgacccagcttatgatgaaaacaagcgccagtttcaagaagatatcaaggtgatgaacgactatgtcgataaaattattgcagatcgcaaagcaaggggtgaacaaagccatgatttattaacgcagatgctaaacggaaaagatccagaaacgggtgagccgcttgatgacgggaacattcgttatcaaattattacattcttaatcgcgggacacgaaacaacaagtggtcttttatcatttgcgctgtatttcttagtgaaaaatccacatgtattacaaaaagtagcagaagaagcagcacgagttctagtagatcctgttccaagctacaaacaagtcaaacagcttaaatatgtcggcatggtcttaaacgaagcgctgcgcttatggccaactggtcctgcgttttccctatatgcaaaagaagatacggtgcttggaggagaatatcctttaaccaaaggcgacgaagtaatggttctgattcctcagcttcaccgtgataaaacaatttggggagacgatgtggaggagttccgtccagagcgttttgaaaatccaagtgcgattccgcagcatgcgtttaaaccgtttggaaacggtcagcgtgcgtgtatcggtcagcagttcgctcttcatgaagcaacgctggtacttggtatgatgctaaaacactttgactttgaagatcatacaaactacgagctcgttattaaggaaaaattaacgttaaaacctgaaggctttgtggtaaaagcaaaatcgaaaggcattccgcttggcggtattccttcacctagcactgaacagtctgctaaaaaagtacgcaaaaaggcagaaaacgctcataatacgccgctgcttgtgctatacggttcaaatgcgggaacagctgaaggaacggcgcgtgatttagcagatattgcaatgagcaaaggatttgcaccgcaggtcgcaacgcttgattcacacgccggaaatcttccgcgcgaaggagctgtattaattgtaacggcgtcttataacggtcatccgcctgataacgcaaagcaatttgtcgactggttagaccaagcgtctgctgatgaagtaaaaggcgttcgctactccgtatttggatgcggcgataaaaactgggctgcgacgtatcaaaaagtgcctgcttttatcgatgaaacgcttgccgctaaaggggcagaaaacatcgctgaccgcggtgaagcagatgcaagcgacgactttgaaggcacgtatgaagaatggagtgatcatatgtggagtgacgtagcagcctactttaacctcgacattgaaaacagtgaagataataaatctactctttcacttcaatttgtcgacagcgccgcggatatgccgcttgcgaaaatgcacggtgcgttttcaacgaacgtcgtagcaagcaaagaacttcaacagccaggcagtgcacgaagcacgcgacatcttgaaattgaacttccaaaagaagcttcttatcaagaaggagatcatttaggtgttattcctcgcaactatgaaggaatagtaaaccgtgtaacagcaaggttcggcctaagcgcatcacagcaaatccgtctggaagcagaagaagaaaaattagctcatttgccactcgctaaaacagtatccgtagaagagcttctgcaatacgtggagcttcaagatcctgttacgcgcacgcagcttcgcgcaatggctgctaaaacggtctgcccgccgcataaagtagagcttgaagccttgcttgaaaagcaagcctacaaagaacaagtgctggcaaaacgtttaacaatgcttgaactgcttgaaaaatacccggcgtgtgaaatgaaattcagcgaatttatcgcccttctgccaagcatacgcccgcgctattactcgatttcttcatcacctcgtgtcgatgaaaaacaagcaagcatcacggtcagcgttgtctcaggaccggcgtggagcggatatggagaatataaaggaattgcgtcgaactatcttgccgagctgcaagaaggagatacgattacgtgctttatttccacagatcagtcagaatttacgctgccaaaagaccctgaaacgccgcttatcatggtcggaccgggaacaggcgtcgcgccgtttagaggctttgtgcaggcgcgcaaacagctaaaagaacaaggacagtcacttggagaagcacatttatacttcggctgccgttcacctcatgaagactatctgtatcaagaagagcttgaaaacgcccaaagcgaaggcatcattacgcttcataccgctttttctcgcatgccaaatcagccgaaaacatacgttcagcacgtaatggaacaagacggcaagaaattgattgaacttcttgatcaaggagcgcacttctatatttgcggagacggaagccaaatggcacctgccgttgaagcaacgcttatgaaaagctatgctgacgttcaccaagtgagtgaagcagacgctcgcttatggctgcagcagctagaagaaaaaggccgatacgcaaaagacgtgtgggctggg

SEQ ID NO: 386 - protein, 1049 aa, synthetic construct
  REGION 1..1049: note = Variant of cytochrome P450
MTIKEMPQPKTFGELKNLPLLNTDKPVQALMRIADELGEIFKFEAPGSVTRFLSSQRLIKEACDERRFDKNLSQSLKFARDFLGDGLFTSWTHEPNWKKAHNILGPSFSQRAMKRYHAMMVDIAVQLVQKWERLNADEHIEVSEDMTRLTLDTIGLCGFNYRFNSFYRDQPHPFIVSVVRALDEVMNKLQRANPDDPAYDENKRQFQEDIKVMNDYVDKIIADRKARGEQSHDLLTQMLNGKDPETGEPLDDGNIRYQIITFLIAGHETTSGLLSFALYFLVKNPHVLQKVAEEAARVLVDPVPSYKQVKQLKYVGMVLNEALRLWPTGPAFSLYAKEDTVLGGEYPLTKGDEVMVLIPQLHRDKTIWGDDVEEFRPERFENPSAIPQHAFKPFGNGQRACIGQQFALHEATLVLGMMLKHFDFEDHTNYELVIKEKLTLKPEGFVVKAKSKGIPLGGIPSPSTEQSAKKVRKKAENAHNTPLLVLYGSNAGTAEGTARDLADIAMSKGFAPQVATLDSHAGNLPREGAVLIVTASYNGHPPDNAKQFVDWLDQASADEVKGVRYSVFGCGDKNWAATYQKVPAFIDETLAAKGAENIADRGEADASDDFEGTYEEWSDHMWSDVAAYFNLDIENSEDNKSTLSLQFVDSAADMPLAKMHGAFSTNVVASKELQQPGSARSTRHLEIELPKEASYQEGDHLGVIPRNYEGIVNRVTARFGLSASQQIRLEAEEEKLAHLPLAKTVSVEELLQYVELQDPVTRTQLRAMAAKTVCPPHKVELEALLEKQAYKEQVLAKRLTMLELLEKYPACEMKFSEFIALLPSIRPRYYSISSSPRVDEKQASITVSVVSGPAWSGYGEYKGIASNYLAELQEGDTITCFISTDQSEFTLPKDPETPLIMVGPGTGVAPFRGFVQARKQLKEQGQSLGEAHLYFGCRSPHEDYLYQEELENAQSEGIITLHTAFSRMPNQPKTYVQHVMEQDGKKLIELLDQGAHFYICGDGSQMAPAVEATLMKSYADVHQVSEADARLWLQQLEEKGRYAKDVWAG

SEQ ID NO: 387 - DNA, 3147 bp, synthetic construct
  misc_feature 1..3147: note = Variant of cytochrome P450
  source 1..3147: mol_type = other DNA
atgacaattaaggaaatgcctcagcctaagacgtttggagaacttaaaaatttaccgttattaaacacagataaaccggttcaagctttgatgcgtattgcggatgaattaggagaaatctttaaattcgaggcgcctggtagcgtaacgcgctttttatcaagtcagcgtctaattaaagaagcatgcgatgaacgtcgctttgataaaaacttaagtcaatcgctgaaatttgcccgtgattttctgggagacgggttatttacaagctggacgcatgaaccgaattggaaaaaagcgcataatatcttaggcccaagctttagtcagcgtgcaatgaaacgttatcatgcgatgatggtcgatatcgccgtgcagcttgttcaaaagtgggagcgtctaaatgcagatgagcatattgaagtatcggaagacatgacacgtttaacgctggatacaattggtctttgcggcttcaactatcgctttaacagcttttaccgagatcagcctcatccatttattgtgagtgttgtgcgtgcactggatgaagtaatgaacaagctgcagcgagcaaatccagacgacccagcttatgatgaaaacaagcgccagtgtcaagaagatatcaaggtgatgaacgactatgtcgataaaattattgcagatcgcaaagcaaggggtgaacaaagccatgatttattaacgcagatgctaaacggaaaagatccagaaacgggtgagccgcttgatgacgggaacattcgttatcaaattattacattcttaatcgcgggacacgaaacaacaagtggtcttttatcatttgcgctgtatttcttagtgaaaaatccacatgtattacaaaaagtagcagaagaagcagcacgagttctagtagatcctgttccaagctacaaacaagtcaaacagcttaaatatgtcggcatggtcttaaacgaagcgctgcgcttatggccaactggtcctgcgttttccctatatgcaaaagaagatacggtgcttggaggagaatatcctttaaccaaaggcgacgaagtaatggttctgattcctcagcttcaccgtgataaaacaatttggggagacgatgtggaggagttccgtccagagcgttttgaaaatccaagtgcgattccgcagcatgcgtttaaaccgtttggaaacggtcagcgtgcgtgtatcggtcagcagttcgctcttcatgaagcaacgctggtacttggtatgatgctaaaacactttgactttgaagatcatacaaactacgagctcgttattggcgaacgcttaacgttaaaacctgaaggctttgtggtaaaagcaaaatcgaaaggcattccgcttggcggtattccttcacctagcactgaacagtctgctaaaaaagtacgcaaaaaggcagaaaacgctcataatacgccgctgcttgtgctatacggttcaaatgcgggaacagctgaaggaacggcgcgtgatttagcagatattgcaatgagcaaaggatttgcaccgcaggtcgcaacgcttgattcacacgccggaaatcttccgcgcgaaggagctgtattaattgtaacggcgtcttataacggtcatccgcctgataacgcaaagcaatttgtcgactggttagaccaagcgtctgctgatgaagtaaaaggcgttcgctactccgtatttggatgcggcgataaaaactgggctgcgacgtatcaaaaagtgcctgcttttatcgatgaaacgcttgccgctaaaggggcagaaaacatcgctgaccgcggtgaagcagatgcaagcgacgactttgaaggcacgtatgaagaatggagtgatcatatgtggagtgacgtagcagcctactttaacctcgacattgaaaacagtgaagataataaatctactctttcacttcaatttgtcgacagcgccgcggatatgccgcttgcgaaaatgcacggtgcgttttcaacgaacgtcgtagcaagcaaagaacttcaacagccaggcagtgcacgaagcacgcgacatcttgaaattgaacttccaaaagaagcttcttatcaagaaggagatcatttaggtgttattcctcgcaactatgaaggaatagtaaaccgtgtaacagcaaggttcggcctaagcgcatcacagcaaatccgtctggaagcagaagaagaaaaattagctcatttgccactcgctaaaacagtatccgtagaagagcttctgcaatacgtggagcttcaagatcctgttacgcgcacgcagcttcgcgcaatggctgctaaaacggtctgcccgccgcataaagtagagcttgaagccttgcttgaaaagcaagcctacaaagaacaagtgctggcaaaacgtttaacaatgcttgaactgcttgaaaaatacccggcgtgtgaaatgaaattcagcgaatttatcgcccttctgccaagcatacgcccgcgctattactcgatttcttcatcacctcgtgtcgatgaaaaacaagcaagcatcacggtcagcgttgtctcaggaccggcgtggagcggatatggagaatataaaggaattgcgtcgaactatcttgccgagctgcaagaaggagatacgattacgtgctttatttccacagatcagtcagaatttacgctgccaaaagaccctgaaacgccgcttatcatggtcggaccgggaacaggcgtcgcgccgtttagaggctttgtgcaggcgcgcaaacagctaaaagaacaaggacagtcacttggagaagcacatttatacttcggctgccgttcacctcatgaagactatctgtatcaagaagagcttgaaaacgcccaaagcgaaggcatcattacgcttcataccgctttttctcgcatgccaaatcagccgaaaacatacgttcagcacgtaatggaacaagacggcaagaaattgattgaacttcttgatcaaggagcgcacttctatatttgcggagacggaagccaaatggcacctgccgttgaagcaacgcttatgaaaagctatgctgacgttcaccaagtgagtgaagcagacgctcgcttatggctgcagcagctagaagaaaaaggccgatacgcaaaagacgtgtgggctggg

SEQ ID NO: 388 - protein, 1049 aa, synthetic construct
  REGION 1..1049: note = Variant of cytochrome P450
MTIKEMPQPKTFGELKNLPLLNTDKPVQALMRIADELGEIFKFEAPGSVTRFLSSQRLIKEACDERRFDKNLSQSLKFARDFLGDGLFTSWTHEPNWKKAHNILGPSFSQRAMKRYHAMMVDIAVQLVQKWERLNADEHIEVSEDMTRLTLDTIGLCGFNYRFNSFYRDQPHPFIVSVVRALDEVMNKLQRANPDDPAYDENKRQCQEDIKVMNDYVDKIIADRKARGEQSHDLLTQMLNGKDPETGEPLDDGNIRYQIITFLIAGHETTSGLLSFALYFLVKNPHVLQKVAEEAARVLVDPVPSYKQVKQLKYVGMVLNEALRLWPTGPAFSLYAKEDTVLGGEYPLTKGDEVMVLIPQLHRDKTIWGDDVEEFRPERFENPSAIPQHAFKPFGNGQRACIGQQFALHEATLVLGMMLKHFDFEDHTNYELVIGERLTLKPEGFVVKAKSKGIPLGGIPSPSTEQSAKKVRKKAENAHNTPLLVLYGSNAGTAEGTARDLADIAMSKGFAPQVATLDSHAGNLPREGAVLIVTASYNGHPPDNAKQFVDWLDQASADEVKGVRYSVFGCGDKNWAATYQKVPAFIDETLAAKGAENIADRGEADASDDFEGTYEEWSDHMWSDVAAYFNLDIENSEDNKSTLSLQFVDSAADMPLAKMHGAFSTNVVASKELQQPGSARSTRHLEIELPKEASYQEGDHLGVIPRNYEGIVNRVTARFGLSASQQIRLEAEEEKLAHLPLAKTVSVEELLQYVELQDPVTRTQLRAMAAKTVCPPHKVELEALLEKQAYKEQVLAKRLTMLELLEKYPACEMKFSEFIALLPSIRPRYYSISSSPRVDEKQASITVSVVSGPAWSGYGEYKGIASNYLAELQEGDTITCFISTDQSEFTLPKDPETPLIMVGPGTGVAPFRGFVQARKQLKEQGQSLGEAHLYFGCRSPHEDYLYQEELENAQSEGIITLHTAFSRMPNQPKTYVQHVMEQDGKKLIELLDQGAHFYICGDGSQMAPAVEATLMKSYADVHQVSEADARLWLQQLEEKGRYAKDVWAG

SEQ ID NO: 389 - DNA, 3147 bp, synthetic construct
  misc_feature 1..3147: note = Variant of cytochrome P450
  source 1..3147: mol_type = other DNA
atgacaattaaggaaatgcctcagcctaagacgtttggagaacttaaaaatttaccgttattaaacacagataaaccggttcaagctttgatgcgtattgcggatgaattaggagaaatctttaaattcgaggcgcctggtagcgtaacgcgctttttatcaagtcagcgtctaattaaagaagcatgcgatgaatcacgctttgataaaaacttaagtcaatcgctgaaatttgggcgtgattttctgggagacgggttatttacaagctggacgcatgaaccgaattggaaaaaagcgcataatatcttaggcccaagctttagtcagcgtgcaatgaaacgttatcatgcgatgatggtcgatatcgccgtgcagcttgttcaaaagtgggagcgtctaaatgcagatgagcatattgaagtatcggaagacatgacacgtttaacgctggatacaattggtctttgcggcttcaactatcgctttaacagcttttaccgagatcagcctcatccatttattgtggcggtagtgcgtgcactggatgaagtaatgaacaagctgcagcgagcaaatccagacgacccagcttatgatgaaaacaagcgccagtgtcaagaagatatcaaggtgatgaacgactatgtcgataaaattattgcagatcgcaaagcaaggggtgaacaaagccatgatttattaacgcagatgctaaacggaaaagatccagaaacgggtgagccgcttgatgacgggaacattcgttatcaaattattacattcttaatcgcgggacacgaaacaacaagtggtcttttatcatttgcgctgtatttcttagtgaaaaatccacatgtattacaaaaagtagcagaagaagcagcacgagttctagtagatcctgttccaagctacaaacaagtcaaacagcttaaatatgtcggcatggtcttaaacgaagcgctgcgcttatggccaactggtcctgcgttttccctatatgcaaaagaagatacggtgcttggaggagaatatcctttaaccaaaggcgacgaagtaatggttctgattcctcagcttcaccgtgataaaacaatttggggagacgatgtggaggagttccgtccagagcgttttgaaaatccaagtgcgattccgcagcatgcgtttaaaccgtttggaaacggtcagcgtgcgtgtatcggtcagcagttcgctcttcatgaagcaacgctggtacttggtatgatgctaaaacactttgactttgaagatcatacaaactacgagctcgttattggcgaacgcttaacgttaaaacctgaaggctttgtggtaaaagcaaaatcgaaaggcattccgcttggcggtattccttcacctagcactgaacagtctgctaaaaaagtacgcaaaaaggcagaaaacgctcataatacgccgctgcttgtgctatacggttcaaatgcgggaacagctgaaggaacggcgcgtgatttagcagatattgcaatgagcaaaggatttgcaccgcaggtcgcaacgcttgattcacacgccggaaatcttccgcgcgaaggagctgtattaattgtaacggcgtcttataacggtcatccgcctgataacgcaaagcaatttgtcgactggttagaccaagcgtctgctgatgaagtaaaaggcgttcgctactccgtatttggatgcggcgataaaaactgggctgcgacgtatcaaaaagtgcctgcttttatcgatgaaacgcttgccgctaaaggggcagaaaacatcgctgaccgcggtgaagcagatgcaagcgacgactttgaaggcgcgtatgaagaatggagtgatcatatgtggagtgacgtagcagcctactttaacctcgacattgaaaacagtgaagataataaatctactctttcacttcaatttgtcgacagcgccgcggatatgccgcttgcgaaaatgcacggtgcgttttcaacgaacgtcgtagcaagcaaagaacttcaacagccaggcagtgcacgaagcacgcgacatcttgaaattgaacttccaaaagaagcttcttatcaagaaggagatcatttaggtgttattcctcgcaactatgaaggaatagtaaaccgtgtaacagcaaggttcggcctaagcgcatcacagcaaatccgtctggaagcagaagaagaaaaattagctcatttgccactcgctaaaacagtatccgtagaagagcttctgcaatacgtggagcttcaagatcctgttacgcgcacgcagcttcgcgcaatggctgctaaaacggtctgcccgccgcataaagtagagcttgaagccttgcttgaaaagcaagcctacaaagaacaagtgctggcaaaacgtttaacaatgcttgaactgcttgaaaaatacccggcgtgtgaaatgaaattcagcgaatttatcgcccttctgccaagcatacgcccgcgctattactcgatttcttcatcacctcgtgtcgatgaaaaacaagcaagcatcacggtcagcgttgtctcaggaccggcgtggagcggatatggagaatataaaggaattgcgtcgaactatcttgccgagctgcaagaaggagatacgattacgtgctttatttccacagatcagtcagaatttacgctgccaaaagaccctgaaacgccgcttatcatggtcggaccgggaacaggcgtcgcgccgtttagaggctttgtgcaggcgcgcaaacagctaaaagaacaaggacagtcacttggagaagcacatttatacttcggctgccgttcacctcatgaagactatctgtatcaagaagagcttgaaaacgcccaaagcgaaggcatcattacgcttcataccgctttttctcgcatgccaaatcagccgaaaacatacgttcagcacgtaatggaacaagacggcaagaaattgattgaacttcttgatcaaggagcgcacttctatatttgcggagacggaagccaaatggcacctgccgttgaagcaacgcttatgaaaagctatgctgacgttcaccaagtgagtgaagcagacgctcgcttatggctgcagcagctagaagaaaaaggccgatacgcaaaagacgtgtgggctggg

SEQ ID NO: 390 - protein, 1049 aa, synthetic construct
  REGION 1..1049: note = Variant of cytochrome P450
MTIKEMPQPKTFGELKNLPLLNTDKPVQALMRIADELGEIFKFEAPGSVTRFLSSQRLIKEACDESRFDKNLSQSLKFGRDFLGDGLFTSWTHEPNWKKAHNILGPSFSQRAMKRYHAMMVDIAVQLVQKWERLNADEHIEVSEDMTRLTLDTIGLCGFNYRFNSFYRDQPHPFIVAVVRALDEVMNKLQRANPDDPAYDENKRQCQEDIKVMNDYVDKIIADRKARGEQSHDLLTQMLNGKDPETGEPLDDGNIRYQIITFLIAGHETTSGLLSFALYFLVKNPHVLQKVAEEAARVLVDPVPSYKQVKQLKYVGMVLNEALRLWPTGPAFSLYAKEDTVLGGEYPLTKGDEVMVLIPQLHRDKTIWGDDVEEFRPERFENPSAIPQHAFKPFGNGQRACIGQQFALHEATLVLGMMLKHFDFEDHTNYELVIGERLTLKPEGFVVKAKSKGIPLGGIPSPSTEQSAKKVRKKAENAHNTPLLVLYGSNAGTAEGTARDLADIAMSKGFAPQVATLDSHAGNLPREGAVLIVTASYNGHPPDNAKQFVDWLDQASADEVKGVRYSVFGCGDKNWAATYQKVPAFIDETLAAKGAENIADRGEADASDDFEGAYEEWSDHMWSDVAAYFNLDIENSEDNKSTLSLQFVDSAADMPLAKMHGAFSTNVVASKELQQPGSARSTRHLEIELPKEASYQEGDHLGVIPRNYEGIVNRVTARFGLSASQQIRLEAEEEKLAHLPLAKTVSVEELLQYVELQDPVTRTQLRAMAAKTVCPPHKVELEALLEKQAYKEQVLAKRLTMLELLEKYPACEMKFSEFIALLPSIRPRYYSISSSPRVDEKQASITVSVVSGPAWSGYGEYKGIASNYLAELQEGDTITCFISTDQSEFTLPKDPETPLIMVGPGTGVAPFRGFVQARKQLKEQGQSLGEAHLYFGCRSPHEDYLYQEELENAQSEGIITLHTAFSRMPNQPKTYVQHVMEQDGKKLIELLDQGAHFYICGDGSQMAPAVEATLMKSYADVHQVSEADARLWLQQLEEKGRYAKDVWAG

SEQ ID NO: 391 - DNA, 3147 bp, synthetic construct
  misc_feature 1..3147: note = Variant of cytochrome P450
  source 1..3147: mol_type = other DNA
atgacaattaaggaaatgcctcagcctaagacgtttggagaacttaaaaatttaccgttattaaacacagataaaccggttcaagctttgatgcgtattgcggatgaattaggagaaatctttaaattcgaggcgcctggtagcgtaacgcgctttttatcaagtcagcgtctaattaaagaagcatgcgatgaaagtcgctttgataaaaacttaagtcaatcgctgaaatttgcccgtgcttttctgggagacgggttattcacaagctggacgcatgaaccgaattggaaaaaagcgcataatatcttaggcccaagctttagtcagcgtgcaatgaaacgttatcatgcgatgatggtcgatatcgccgtgcagcttgttcaaaagtgggagcgtctaaatgcagatgagcatattgaagtatcggaagacatgacacgtttaacgctggatacaattggtctttgcggcttcaactatcgctttaacagcttttaccgagatcagcctcatccatttattgtgagtgttgtgcgtctgctggatgaagtcatgaacaagctgcagcgagcaaatccagacgacccagcttatgatgaaaacaagcgccagtgtcaagaagatatcaaggtgatgaacgactatgtcgataaaattattgcagatcgcaaagcaaggggtgaacaaagccatgatttattaacgcagatgctaaacggaaaagatccagaaacgggtgagccgcttgatgacgggaacattcgttatcaaattattacattcttaatcgcgggacacgaaacaacaagtggtcttttatcatttgcgctgtatttcttagtgaaaaatccacatgtattacaaaaagtagcagaagaagcagcacgagttctagtagatcctgttccaagctacaaacaagtcaaacagcttaaatatgtcggcatggtcttaaacgaagcgctgcgcttatggccaactggtcctgcgttttccctatatgcaaaagaagatacggtgcttggaggagaatatcctttaaccaaaggcgacgaagtaatggttctgattcctcagcttcaccgtgataaaacaatttggggagacgatgtggaggagttccgtccagagcgttttgaaaatccaagtgcgattccgcagcatgcgtttaaaccgtttggaaacggtcagcgtgcgtgtatcggtcagcagttcgctcttcatgaagcaacgctggtacttggtatgatgctaaaacactttgactttgaagatcatacaaactacgagctcgttattaaggaacgcttaacgttaaaacctgaaggctttgtggtaaaagcaaaatcgaaaggcattccgcttggcctgattccttcacctagcactgaacagtctgctaaaaaagtacgcaaaaaggcagaaaacgctcataatacgccgctgcttgtgctatacggttcaaatgcgggaacagctgaaggaacggcgcgtgatttagcagatattgcaatgagcaaaggatttgcaccgcaggtcgcaacgcttgattcacacgccggaaatcttccgcgcgaaggagctgtattaattgtaacggcgtcttataacggtcatccgcctgataacgcaaagcaatttgtcgactggttagaccaagcgtctgctgatgaagtaaaaggcgttcgctactccgtatttggatgcggcgataaaaactgggctgcgacgtatcaaaaagtgcctgcttttatcgatgaaacgcttgccgctaaaggggcagaaaacatcgctgaccgcggtgaagcagatgcaagcgacgactttgaaggcgcgtatgaagaatggagtgatcatatgtggagtgacgtagcagcctactttaacctcgacattgaaaacagtgaagataataaatctactctttcacttcaatttgtcgacagcgccgcggatatgccgcttgcgaaaatgcacggtgcgttttcaacgaacgtcgtagcaagcaaagaacttcaacagccaggcagtgcacgaagcacgcgacatcttgaaattgaacttccaaaagaagcttcttatcaagaaggagatcatttaggtgttattcctcgcaactatgaaggaatagtaaaccgtgtaacagcaaggttcggcctaagcgcatcacagcaaatccgtctggaagcagaagaagaaaaattagctcatttgccactcgctaaaacagtatccgtagaagagcttctgcaatacgtggagcttcaagatcctgttacgcgcacgcagcttcgcgcaatggctgctaaaacggtctgcccgccgcataaagtagagcttgaagccttgcttgaaaagcaagcctacaaagaacaagtgctggcaaaacgtttaacaatgcttgaactgcttgaaaaatacccggcgtgtgaaatgaaattcagcgaatttatcgcccttctgccaagcatacgcccgcgctattactcgatttcttcatcacctcgtgtcgatgaaaaacaagcaagcatcacggtcagcgttgtctcaggaccggcgtggagcggatatggagaatataaaggaattgcgtcgaactatcttgccgagctgcaagaaggagatacgattacgtgctttatttccacagatcagtcagaatttacgctgccaaaagaccctgaaacgccgcttatcatggtcggaccgggaacaggcgtcgcgccgtttagaggctttgtgcaggcgcgcaaacagctaaaagaacaaggacagtcacttggagaagcacatttatacttcggctgccgttcacctcatgaagactatctgtatcaagaagagcttgaaaacgcccaaagcgaaggcatcattacgcttcataccgctttttctcgcatgccaaatcagccgaaaacatacgttcagcacgtaatggaacaagacggcaagaaattgattgaacttcttgatcaaggagcgcacttctatatttgcggagacggaagccaaatggcacctgccgttgaagcaacgcttatgaaaagctatgctgacgttcaccaagtgagtgaagcagacgctcgcttatggctgcagcagctagaagaaaaaggccgatacgcaaaagacgtgtgggctggg

SEQ ID NO: 392 - protein, 1049 aa, synthetic construct
  REGION 1..1049: note = Variant of cytochrome P450
MTIKEMPQPKTFGELKNLPLLNTDKPVQALMRIADELGEIFKFEAPGSVTRFLSSQRLIKEACDESRFDKNLSQSLKFARAFLGDGLFTSWTHEPNWKKAHNILGPSFSQRAMKRYHAMMVDIAVQLVQKWERLNADEHIEVSEDMTRLTLDTIGLCGFNYRFNSFYRDQPHPFIVSVVRLLDEVMNKLQRANPDDPAYDENKRQCQEDIKVMNDYVDKIIADRKARGEQSHDLLTQMLNGKDPETGEPLDDGNIRYQIITFLIAGHETTSGLLSFALYFLVKNPHVLQKVAEEAARVLVDPVPSYKQVKQLKYVGMVLNEALRLWPTGPAFSLYAKEDTVLGGEYPLTKGDEVMVLIPQLHRDKTIWGDDVEEFRPERFENPSAIPQHAFKPFGNGQRACIGQQFALHEATLVLGMMLKHFDFEDHTNYELVIKERLTLKPEGFVVKAKSKGIPLGLIPSPSTEQSAKKVRKKAENAHNTPLLVLYGSNAGTAEGTARDLADIAMSKGFAPQVATLDSHAGNLPREGAVLIVTASYNGHPPDNAKQFVDWLDQASADEVKGVRYSVFGCGDKNWAATYQKVPAFIDETLAAKGAENIADRGEADASDDFEGAYEEWSDHMWSDVAAYFNLDIENSEDNKSTLSLQFVDSAADMPLAKMHGAFSTNVVASKELQQPGSARSTRHLEIELPKEASYQEGDHLGVIPRNYEGIVNRVTARFGLSASQQIRLEAEEEKLAHLPLAKTVSVEELLQYVELQDPVTRTQLRAMAAKTVCPPHKVELEALLEKQAYKEQVLAKRLTMLELLEKYPACEMKFSEFIALLPSIRPRYYSISSSPRVDEKQASITVSVVSGPAWSGYGEYKGIASNYLAELQEGDTITCFISTDQSEFTLPKDPETPLIMVGPGTGVAPFRGFVQARKQLKEQGQSLGEAHLYFGCRSPHEDYLYQEELENAQSEGIITLHTAFSRMPNQPKTYVQHVMEQDGKKLIELLDQGAHFYICGDGSQMAPAVEATLMKSYADVHQVSEADARLWLQQLEEKGRYAKDVWAG

SEQ ID NO: 393 - DNA, 3147 bp, synthetic construct
  misc_feature 1..3147: note = Variant of cytochrome P450
  source 1..3147: mol_type = other DNA
atgacaattaaggaaatgcctcagcctaagacgtttggagaacttaaaaatttaccgttattaaacacagataaaccggttcaagctttgatgcgtattgcggatgaattaggagaaatctttaaattcgaggcgcctggtagcgtaacgcgctttttatcaagtcagcgtctaattaaagaagcatgcgatgaacgtcgctttgataaaaacttaagtcaatcgctgaaatttgcccgtgattttctgggagacgggttatttacaagctggacgcatgaaccgaattggaaaaaagcgcataatatcttaggcccaagctttagtcagcgtgcaatgaaacgttatcatgcgatgatggtcgatatcgccgtgcagcttgttcaaaagtgggagcgtctaaatgcagatgagcatattgaagtatcggaagacatgacacgtttaacgctggatacaattggtctttgcggcttcaactatcgctttaacagcttttaccgagatcagcctcatccatttattgtgagtgttgtgcgtgcactggatgaagtaatgaacaagctgcagcgagcaaatccagacgacccagcttatgatgaaaacaagcgccagtgtcaagaagatatcaaggtgatgaacgactatgtcgataaaattattgcagatcgcaaagcaaggggtgaacaaagccatgatttattaacgcagatgctaaacggaaaagatccagaaacgggtgagccgcttgatgacgggaacattcgttatcaaattattacattcttaatcgcgggacacgaaacaacaagtggtcttttatcatttgcgctgtatttcttagtgaaaaatccacatgtattacaaaaagtagcagaagaagcagcacgagttctagtagatcctgttccaagctacaaacaagtcaaacagcttaaatatgtcggcatggtcttaaacgaagcgctgcgcttatggccaactggtcctgcgttttccctatatgcaaaagaagatacggtgcttggaggagaatatcctttaaccaaaggcgacgaagtaatggttctgattcctcagcttcaccgtgataaaacaatttggggagacgatgtggaggagttccgtccagagcgttttgaaaatccaagtgcgattccgcagcatgcgtttaaaccgtttggaaacggtcagcgtgcgtgtatcggtcagcagttcgctcttcatgaagcaacgctggtacttggtatgatgctaaaacactttgactttgaagatcatacaaactacgagctcgttattggcgaaaaattaacgttaaaacctgaaggctttgtggtaaaagcaaaatcgaaaggcattccgcttggcctgattccttcacctagcactgaacagtctgctaaaaaagtacgcaaaaaggcagaaaacgctcataatacgccgctgcttgtgctatacggttcaaatgcgggaacagctgaaggaacggcgcgtgatttagcagatattgcaatgagcaaaggatttgcaccgcaggtcgcaacgcttgattcacacgccggaaatcttccgcgcgaaggagctgtattaattgtaacggcgtcttataacggtcatccgcctgataacgcaaagcaatttgtcgactggttagaccaagcgtctgctgatgaagtaaaaggcgttcgctactccgtatttggatgcggcgataaaaactgggctgcgacgtatcaaaaagtgcctgcttttatcgatgaaacgcttgccgctaaaggggcagaaaacatcgctgaccgcggtgaagcagatgcaagcgacgactttgaaggcacgtatgaagaatggagtgatcatatgtggagtgacgtagcagcctactttaacctcgacattgaaaacagtgaagataataaatctactctttcacttcaatttgtcgacagcgccgcggatatgccgcttgcgaaaatgcacggtgcgttttcaacgaacgtcgtagcaagcaaagaacttcaacagccaggcagtgcacgaagcacgcgacatcttgaaattgaacttccaaaagaagcttcttatcaagaaggagatcatttaggtgttattcctcgcaactatgaaggaatagtaaaccgtgtaacagcaaggttcggcctaagcgcatcacagcaaatccgtctggaagcagaagaagaaaaattagctcatttgccactcgctaaaacagtatccgtagaagagcttctgcaatacgtggagcttcaagatcctgttacgcgcacgcagcttcgcgcaatggctgctaaaacggtctgcccgccgcataaagtagagcttgaagccttgcttgaaaagcaagcctacaaagaacaagtgctggcaaaacgtttaacaatgcttgaactgcttgaaaaatacccggcgtgtgaaatgaaattcagcgaatttatcgcccttctgccaagcatacgcccgcgctattactcgatttcttcatcacctcgtgtcgatgaaaaacaagcaagcatcacggtcagcgttgtctcaggaccggcgtggagcggatatggagaatataaaggaattgcgtcgaactatcttgccgagctgcaagaaggagatacgattacgtgctttatttccacagatcagtcagaatttacgctgccaaaagaccctgaaacgccgcttatcatggtcggaccgggaacaggcgtcgcgccgtttagaggctttgtgcaggcgcgcaaacagctaaaagaacaaggacagtcacttggagaagcacatttatacttcggctgccgttcacctcatgaagactatctgtatcaagaagagcttgaaaacgcccaaagcgaaggcatcattacgcttcataccgctttttctcgcatgccaaatcagccgaaaacatacgttcagcacgtaatggaacaagacggcaagaaattgattgaacttcttgatcaaggagcgcacttctatatttgcggagacggaagccaaatggcacctgccgttgaagcaacgcttatgaaaagctatgctgacgttcaccaagtgagtgaagcagacgctcgcttatggctgcagcagctagaagaaaaaggccgatacgcaaaagacgtgtgggctggg

SEQ ID NO: 394 - protein, 1049 aa, synthetic construct
  REGION 1..1049: note = Variant of cytochrome P450
MTIKEMPQPKTFGELKNLPLLNTDKPVQALMRIADELGEIFKFEAPGSVTRFLSSQRLIKEACDERRFDKNLSQSLKFARDFLGDGLFTSWTHEPNWKKAHNILGPSFSQRAMKRYHAMMVDIAVQLVQKWERLNADEHIEVSEDMTRLTLDTIGLCGFNYRFNSFYRDQPHPFIVSVVRALDEVMNKLQRANPDDPAYDENKRQCQEDIKVMNDYVDKIIADRKARGEQSHDLLTQMLNGKDPETGEPLDDGNIRYQIITFLIAGHETTSGLLSFALYFLVKNPHVLQKVAEEAARVLVDPVPSYKQVKQLKYVGMVLNEALRLWPTGPAFSLYAKEDTVLGGEYPLTKGDEVMVLIPQLHRDKTIWGDDVEEFRPERFENPSAIPQHAFKPFGNGQRACIGQQFALHEATLVLGMMLKHFDFEDHTNYELVIGEKLTLKPEGFVVKAKSKGIPLGLIPSPSTEQSAKKVRKKAENAHNTPLLVLYGSNAGTAEGTARDLADIAMSKGFAPQVATLDSHAGNLPREGAVLIVTASYNGHPPDNAKQFVDWLDQASADEVKGVRYSVFGCGDKNWAATYQKVPAFIDETLAAKGAENIADRGEADASDDFEGTYEEWSDHMWSDVAAYFNLDIENSEDNKSTLSLQFVDSAADMPLAKMHGAFSTNVVASKELQQPGSARSTRHLEIELPKEASYQEGDHLGVIPRNYEGIVNRVTARFGLSASQQIRLEAEEEKLAHLPLAKTVSVEELLQYVELQDPVTRTQLRAMAAKTVCPPHKVELEALLEKQAYKEQVLAKRLTMLELLEKYPACEMKFSEFIALLPSIRPRYYSISSSPRVDEKQASITVSVVSGPAWSGYGEYKGIASNYLAELQEGDTITCFISTDQSEFTLPKDPETPLIMVGPGTGVAPFRGFVQARKQLKEQGQSLGEAHLYFGCRSPHEDYLYQEELENAQSEGIITLHTAFSRMPNQPKTYVQHVMEQDGKKLIELLDQGAHFYICGDGSQMAPAVEATLMKSYADVHQVSEADARLWLQQLEEKGRYAKDVWAG

SEQ ID NO: 395 - DNA, 3147 bp, synthetic construct
  misc_feature 1..3147: note = Variant of cytochrome P450
  source 1..3147: mol_type = other DNA
atgacaattaaggaaatgcctcagcctaagacgtttggagaacttaaaaatttaccgttattaaacacagataaaccggttcaagctttgatgcgtattgcggatgaattaggagaaatctttaaattcgaggcgcctggtagcgtaacgcgctttttatcaagtcagcgtctaattaaagaagcatgcgatgaatcacgctttgataaaaacttaagtcaatcgctgaaatttggccgtgattttctgggagacgggttatttacaagctggacgcatgaaccgaattggaaaaaagcgcataatatcttaggcccaagctttagtcagcgtgcaatgaaacgttatcatgcgatgatggtcgatatcgccgtgcagcttgttcaaaagtgggagcgtctaaatgcagatgagcatattgaagtatcggaagacatgacacgtttaacgctggatacaattggtctttgcggcttcaactatcgctttaacagcttttaccgagatcagcctcatccatttattgtgagtgttgtgcgtgcactggatgaagtaatgaacaagctgcagcgagcaaatccagacgacccagcttatgatgaaaacaagcgccagtgtcaagaagatatcaaggtgatgaacgactatgtcgataaaattattgcagatcgcaaagcaaggggtgaacaaagccatgatttattaacgcagatgctaaacggaaaagatccagaaacgggtgagccgcttgatgacgggaacattcgttatcaaattattacattcttaatcgcgggacacgaaacaacaagtggtcttttatcatttgcgctgtatttcttagtgaaaaatccacatgtattacaaaaagtagcagaagaagcagcacgagttctagtagatcctgttccaagctacaaacaagtcaaacagcttaaatatgtcggcatggtcttaaacgaagcgctgcgcttatggccaactggtcctgcgttttccctatatgcaaaagaagatacggtgcttggaggagaatatcctttaaccaaaggcgacgaagtaatggttctgattcctcagcttcaccgtgataaaacaatttggggagacgatgtggaggagttccgtccagagcgttttgaaaatccaagtgcgattccgcagcatgcgtttaaaccgtttggaaacggtcagcgtgcgtgtatcggtcagcagttcgctcttcatgaagcaacgctggtacttggtatgatgctaaaacactttgactttgaagatcatacaaactacgagctcgttattaaggaacgcttaacgttaaaacctgaaggctttgtggtaaaagcaaaatcgaaaggcattccgcttggcggcattccttcacctagcactgaacagtctgctaaaaaagtacgcaaaaaggcagaaaacgctcataatacgccgctgcttgtgctatacggttcaaatgcgggaacagctgaaggaacggcgcgtgatttagcagatattgcaatgagcaaaggatttgcaccgcaggtcgcaacgcttgattcacacgccggaaatcttccgcgcgaaggagctgtattaattgtaacggcgtcttataacggtcatccgcctgataacgcaaagcaatttgtcgactggttagaccaagcgtctgctgatgaagtaaaaggcgttcgctactccgtatttggatgcggcgataaaaactgggctgcgacgtatcaaaaagtgcctgcttttatcgatgaaacgcttgccgctaaaggggcagaaaacatcgctgaccgcggtgaagcagatgcaagcgacgactttgaaggcgcgtatgaagaatggagtgatcatatgtggagtgacgtagcagcctactttaacctcgacattgaaaacagtgaagataataaatctactctttcacttcaatttgtcgacagcgccgcggatatgccgcttgcgaaaatgcacggtgcgttttcaacgaacgtcgtagcaagcaaagaacttcaacagccaggcagtgcacgaagcacgcgacatcttgaaattgaacttccaaaagaagcttcttatcaagaaggagatcatttaggtgttattcctcgcaactatgaaggaatagtaaaccgtgtaacagcaaggttcggcctaagcgcatcacagcaaatccgtctggaagcagaagaagaaaaattagctcatttgccactcgctaaaacagtatccgtagaagagcttctgcaatacgtggagcttcaagatcctgttacgcgcacgcagcttcgcgcaatggctgctaaaacggtctgcccgccgcataaagtagagcttgaagccttgcttgaaaagcaagcctacaaagaacaagtgctggcaaaacgtttaacaatgcttgaactgcttgaaaaatacccggcgtgtgaaatgaaattcagcgaatttatcgcccttctgccaagcatacgcccgcgctattactcgatttcttcatcacctcgtgtcgatgaaaaacaagcaagcatcacggtcagcgttgtctcaggaccggcgtggagcggatatggagaatataaaggaattgcgtcgaactatcttgccgagctgcaagaaggagatacgattacgtgctttatttccacagatcagtcagaatttacgctgccaaaagaccctgaaacgccgcttatcatggtcggaccgggaacaggcgtcgcgccgtttagaggctttgtgcaggcgcgcaaacagctaaaagaacaaggacagtcacttggagaagcacatttatacttcggctgccgttcacctcatgaagactatctgtatcaagaagagcttgaaaacgcccaaagcgaaggcatcattacgcttcataccgctttttctcgcatgccaaatcagccgaaaacatacgttcagcacgtaatggaacaagacggcaagaaattgattgaacttcttgatcaaggagcgcacttctatatttgcggagacggaagccaaatggcacctgccgttgaagcaacgcttatgaaaagctatgctgacgttcaccaagtgagtgaagcagacgctcgcttatggctgcagcagctagaagaaaaaggccgatacgcaaaagacgtgtgggctggg

SEQ ID NO: 396 - protein, 1049 aa, synthetic construct
  REGION 1..1049: note = Variant of cytochrome P450
MTIKEMPQPKTFGELKNLPLLNTDKPVQALMRIADELGEIFKFEAPGSVTRFLSSQRLIKEACDESRFDKNLSQSLKFGRDFLGDGLFTSWTHEPNWKKAHNILGPSFSQRAMKRYHAMMVDIAVQLVQKWERLNADEHIEVSEDMTRLTLDTIGLCGFNYRFNSFYRDQPHPFIVSVVRALDEVMNKLQRANPDDPAYDENKRQCQEDIKVMNDYVDKIIADRKARGEQSHDLLTQMLNGKDPETGEPLDDGNIRYQIITFLIAGHETTSGLLSFALYFLVKNPHVLQKVAEEAARVLVDPVPSYKQVKQLKYVGMVLNEALRLWPTGPAFSLYAKEDTVLGGEYPLTKGDEVMVLIPQLHRDKTIWGDDVEEFRPERFENPSAIPQHAFKPFGNGQRACIGQQFALHEATLVLGMMLKHFDFEDHTNYELVIKERLTLKPEGFVVKAKSKGIPLGGIPSPSTEQSAKKVRKKAENAHNTPLLVLYGSNAGTAEGTARDLADIAMSKGFAPQVATLDSHAGNLPREGAVLIVTASYNGHPPDNAKQFVDWLDQASADEVKGVRYSVFGCGDKNWAATYQKVPAFIDETLAAKGAENIADRGEADASDDFEGAYEEWSDHMWSDVAAYFNLDIENSEDNKSTLSLQFVDSAADMPLAKMHGAFSTNVVASKELQQPGSARSTRHLEIELPKEASYQEGDHLGVIPRNYEGIVNRVTARFGLSASQQIRLEAEEEKLAHLPLAKTVSVEELLQYVELQDPVTRTQLRAMAAKTVCPPHKVELEALLEKQAYKEQVLAKRLTMLELLEKYPACEMKFSEFIALLPSIRPRYYSISSSPRVDEKQASITVSVVSGPAWSGYGEYKGIASNYLAELQEGDTITCFISTDQSEFTLPKDPETPLIMVGPGTGVAPFRGFVQARKQLKEQGQSLGEAHLYFGCRSPHEDYLYQEELENAQSEGIITLHTAFSRMPNQPKTYVQHVMEQDGKKLIELLDQGAHFYICGDGSQMAPAVEATLMKSYADVHQVSEADARLWLQQLEEKGRYAKDVWAG

SEQ ID NO: 397 - DNA, 3147 bp, synthetic construct
  misc_feature 1..3147: note = Variant of cytochrome P450
  source 1..3147: mol_type = other DNA
atgacaattaaggaaatgcctcagcctaagacgtttggagaacttaaaaatttaccgttattaaacacagataaaccggttcaagctttgatgcgtattgcggatgaattaggagaaatctttaaattcgaggcgcctggtagcgtaacgcgctttttatcaagtcagcgtctaattaaagaagcatgcgatgaatcacgctttgataaaaacttaagtcaatcgctgaaatttgggcgtgattttctgggagacgggttatttacaagctggacgcatgaaccgaattggaaaaaagcgcataatatcttaggcccaagctttagtcagcgtgcaatgaaacgttatcatgcgatgatggtcgatatcgccgtgcagcttgttcaaaagtgggagcgtctaaatgcagatgagcatattgaagtatcggaagacatgacacgtttaacgctggatacaattggtctttgcggcttcaactatcgctttaacagcttttaccgagatcagcctcatccatttattgtggcggtagtgcgtgcactggatgaagtaatgaacaagctgcagcgagcaaatccagacgacccagcttatgatgaaaacaagcgccagtttcaagaagatatcaaggtgatgaacgactatgtcgataaaattattgcagatcgcaaagcaaggggtgaacaaagccatgatttattaacgcagatgctaaacggaaaagatccagaaacgggtgagccgcttgatgacgggaacattcgttatcaaattattacattcttaatcgcgggacacgaaacaacaagtggtcttttatcatttgcgctgtatttcttagtgaaaaatccacatgtattacaaaaagtagcagaagaagcagcacgagttctagtagatcctgttccaagctacaaacaagtcaaacagcttaaatatgtcggcatggtcttaaacgaagcgctgcgcttatggccaactggtcctgcgttttccctatatgcaaaagaagatacggtgcttggaggagaatatcctttaaccaaaggcgacgaagtaatggttctgattcctcagcttcaccgtgataaaacaatttggggagacgatgtggaggagttccgtccagagcgttttgaaaatccaagtgcgattccgcagcatgcgtttaaaccgtttggaaacggtcagcgtgcgtgtatcggtcagcagttcgctcttcatgaagcaacgctggtacttggtatgatgctaaaacactttgactttgaagatcatacaaactacgagctcgttattggcgaacgcttaacgttaaaacctgaaggctttgtggtaaaagcaaaatcgaaaggcattccgcttggcctgattccttcacctagcactgaacagtctgctaaaaaagtacgcaaaaaggcagaaaacgctcataatacgccgctgcttgtgctatacggttcaaatgcgggaacagctgaaggaacggcgcgtgatttagcagatattgcaatgagcaaaggatttgcaccgcaggtcgcaacgcttgattcacacgccggaaatcttccgcgcgaaggagctgtattaattgtaacggcgtcttataacggtcatccgcctgataacgcaaagcaatttgtcgactggttagaccaagcgtctgctgatgaagtaaaaggcgttcgctactccgtatttggatgcggcgataaaaactgggctgcgacgtatcaaaaagtgcctgcttttatcgatgaaacgcttgccgctaaaggggcagaaaacatcgctgaccgcggtgaagcagatgcaagcgacgactttgaaggcacgtatgaagaatggagtgatcatatgtggagtgacgtagcagcctactttaacctcgacattgaaaacagtgaagataataaatctactctttcacttcaatttgtcgacagcgccgcggatatgccgcttgcgaaaatgcacggtgcgttttcaacgaacgtcgtagcaagcaaagaacttcaacagccaggcagtgcacgaagcacgcgacatcttgaaattgaacttccaaaagaagcttcttatcaagaaggagatcatttaggtgttattcctcgcaactatgaaggaatagtaaaccgtgtaacagcaaggttcggcctaagcgcatcacagcaaatccgtctggaagcagaagaagaaaaattagctcatttgccactcgctaaaacagtatccgtagaagagcttctgcaatacgtggagcttcaagatcctgttacgcgcacgcagcttcgcgcaatggctgctaaaacggtctgcccgccgcataaagtagagcttgaagccttgcttgaaaagcaagcctacaaagaacaagtgctggcaaaacgtttaacaatgcttgaactgcttgaaaaatacccggcgtgtgaaatgaaattcagcgaatttatcgcccttctgccaagcatacgcccgcgctattactcgatttcttcatcacctcgtgtcgatgaaaaacaagcaagcatcacggtcagcgttgtctcaggaccggcgtggagcggatatggagaatataaaggaattgcgtcgaactatcttgccgagctgcaagaaggagatacgattacgtgctttatttccacagatcagtcagaatttacgctgccaaaagaccctgaaacgccgcttatcatggtcggaccgggaacaggcgtcgcgccgtttagaggctttgtgcaggcgcgcaaacagctaaaagaacaaggacagtcacttggagaagcacatttatacttcggctgccgttcacctcatgaagactatctgtatcaagaagagcttgaaaacgcccaaagcgaaggcatcattacgcttcataccgctttttctcgcatgccaaatcagccgaaaacatacgttcagcacgtaatggaacaagacggcaagaaattgattgaacttcttgatcaaggagcgcacttctatatttgcggagacggaagccaaatggcacctgccgttgaagcaacgcttatgaaaagctatgctgacgttcaccaagtgagtgaagcagacgctcgcttatggctgcagcagctagaagaaaaaggccgatacgcaaaagacgtgtgggctggg

SEQ ID NO: 398 - protein, 1049 aa, synthetic construct
  REGION 1..1049: note = Variant of cytochrome P450
MTIKEMPQPKTFGELKNLPLLNTDKPVQALMRIADELGEIFKFEAPGSVTRFLSSQRLIKEACDESRFDKNLSQSLKFGRDFLGDGLFTSWTHEPNWKKAHNILGPSFSQRAMKRYHAMMVDIAVQLVQKWERLNADEHIEVSEDMTRLTLDTIGLCGFNYRFNSFYRDQPHPFIVAVVRALDEVMNKLQRANPDDPAYDENKRQFQEDIKVMNDYVDKIIADRKARGEQSHDLLTQMLNGKDPETGEPLDDGNIRYQIITFLIAGHETTSGLLSFALYFLVKNPHVLQKVAEEAARVLVDPVPSYKQVKQLKYVGMVLNEALRLWPTGPAFSLYAKEDTVLGGEYPLTKGDEVMVLIPQLHRDKTIWGDDVEEFRPERFENPSAIPQHAFKPFGNGQRACIGQQFALHEATLVLGMMLKHFDFEDHTNYELVIGERLTLKPEGFVVKAKSKGIPLGLIPSPSTEQSAKKVRKKAENAHNTPLLVLYGSNAGTAEGTARDLADIAMSKGFAPQVATLDSHAGNLPREGAVLIVTASYNGHPPDNAKQFVDWLDQASADEVKGVRYSVFGCGDKNWAATYQKVPAFIDETLAAKGAENIADRGEADASDDFEGTYEEWSDHMWSDVAAYFNLDIENSEDNKSTLSLQFVDSAADMPLAKMHGAFSTNVVASKELQQPGSARSTRHLEIELPKEASYQEGDHLGVIPRNYEGIVNRVTARFGLSASQQIRLEAEEEKLAHLPLAKTVSVEELLQYVELQDPVTRTQLRAMAAKTVCPPHKVELEALLEKQAYKEQVLAKRLTMLELLEKYPACEMKFSEFIALLPSIRPRYYSISSSPRVDEKQASITVSVVSGPAWSGYGEYKGIASNYLAELQEGDTITCFISTDQSEFTLPKDPETPLIMVGPGTGVAPFRGFVQARKQLKEQGQSLGEAHLYFGCRSPHEDYLYQEELENAQSEGIITLHTAFSRMPNQPKTYVQHVMEQDGKKLIELLDQGAHFYICGDGSQMAPAVEATLMKSYADVHQVSEADARLWLQQLEEKGRYAKDVWAG

SEQ ID NO: 399 - DNA, 3147 bp, synthetic construct
  misc_feature 1..3147: note = Variant of cytochrome P450
  source 1..3147: mol_type = other DNA
atgacaattaaggaaatgcctcagcctaagacgtttggagaacttaaaaatttaccgttattaaacacagataaaccggttcaagctttgatgcgtattgcggatgaattaggagaaatctttaaattcgaggcgcctggtagcgtaacgcgctttttatcaagtcagcgtctaattaaagaagcatgcgatgaaagtcgctttgataaaaacttaagtcaatcgctgaaatttgcccgtgcttttctgggagacgggttatttacaagctggacgcatgaaccgaattggaaaaaagcgcataatatcttaggcccaagctttagtcagcgtgcaatgaaacgttatcatgcgatgatggtcgatatcgccgtgcagcttgttcaaaagtgggagcgtctaaatgcagatgagcatattgaagtatcggaagacatgacacgtttaacgctggatacaattggtctttgcggcttcaactatcgctttaacagcttttaccgagatcagcctcatccatttattgtgagtgttgtgcgtgcactggatgaagtaatgaacaagctgcagcgagcaaatccagacgacccagcttatgatgaaaacaagcgccagtgtcaagaagatatcaaggtgatgaacgactatgtcgataaaattattgcagatcgcaaagcaaggggtgaacaaagccatgatttattaacgcagatgctaaacggaaaagatccagaaacgggtgagccgcttgatgacgggaacattcgttatcaaattattacattcttaatcgcgggacacgaaacaacaagtggtcttttatcatttgcgctgtatttcttagtgaaaaatccacatgtattacaaaaagtagcagaagaagcagcacgagttctagtagatcctgttccaagctacaaacaagtcaaacagcttaaatatgtcggcatggtcttaaacgaagcgctgcgcttatggccaactggtcctgcgttttccctatatgcaaaagaagatacggtgcttggaggagaatatcctttaaccaaaggcgacgaagtaatggttctgattcctcagcttcaccgtgataaaacaatttggggagacgatgtggaggagttccgtccagagcgttttgaaaatccaagtgcgattccgcagcatgcgtttaaaccgtttggaaacggtcagcgtgcgtgtatcggtcagcagttcgctcttcatgaagcaacgctggtacttggtatgatgctaaaacactttgactttgaagatcatacaaactacgagctcgttattaaggaacgcttaacgttaaaacctgaaggctttgtggtaaaagcaaaatcgaaaggcattccgcttggcggtattccttcacctagcactgaacagtctgctaaaaaagtacgcaaaaaggcagaaaacgctcataatacgccgctgcttgtgctatacggttcaaatgcgggaacagctgaaggaacggcgcgtgatttagcagatattgcaatgagcaaaggatttgcaccgcaggtcgcaacgcttgattcacacgccggaaatcttccgcgcgaaggagctgtattaattgtaacggcgtcttataacggtcatccgcctgataacgcaaagcaatttgtcgactggttagaccaagcgtctgctgatgaagtaaaaggcgttcgctactccgtatttggatgcggcgataaaaactgggctgcgacgtatcaaaaagtgcctgcttttatcgatgaaacgcttgccgctaaaggggcagaaaacatcgctgaccgcggtgaagcagatgcaagcgacgactttgaaggcgcgtatgaagaatggagtgatcatatgtggagtgacgtagcagcctactttaacctcgacattgaaaacagtgaagataataaatctactctttcacttcaatttgtcgacagcgccgcggatatgccgcttgcgaaaatgcacggtgcgttttcaacgaacgtcgtagcaagcaaagaacttcaacagccaggcagtgcacgaagcacgcgacatcttgaaattgaacttccaaaagaagcttcttatcaagaaggagatcatttaggtgttattcctcgcaactatgaaggaatagtaaaccgtgtaacagcaaggttcggcctaagcgcatcacagcaaatccgtctggaagcagaagaagaaaaattagctcatttgccactcgctaaaacagtatccgtagaagagcttctgcaatacgtggagcttcaagatcctgttacgcgcacgcagcttcgcgcaatggctgctaaaacggtctgcccgccgcataaagtagagcttgaagccttgcttgaaaagcaagcctacaaagaacaagtgctggcaaaacgtttaacaatgcttgaactgcttgaaaaatacccggcgtgtgaaatgaaattcagcgaatttatcgcccttctgccaagcatacgcccgcgctattactcgatttcttcatcacctcgtgtcgatgaaaaacaagcaagcatcacggtcagcgttgtctcaggaccggcgtggagcggatatggagaatataaaggaattgcgtcgaactatcttgccgagctgcaagaaggagatacgattacgtgctttatttccacagatcagtcagaatttacgctgccaaaagaccctgaaacgccgcttatcatggtcggaccgggaacaggcgtcgcgccgtttagaggctttgtgcaggcgcgcaaacagctaaaagaacaaggacagtcacttggagaagcacatttatacttcggctgccgttcacctcatgaagactatctgtatcaagaagagcttgaaaacgcccaaagcgaaggcatcattacgcttcataccgctttttctcgcatgccaaatcagccgaaaacatacgttcagcacgtaatggaacaagacggcaagaaattgattgaacttcttgatcaaggagcgcacttctatatttgcggagacggaagccaaatggcacctgccgttgaagcaacgcttatgaaaagctatgctgacgttcaccaagtgagtgaagcagacgctcgcttatggctgcagcagctagaagaaaaaggccgatacgcaaaagacgtgtgggctggg

SEQ ID NO: 400 - protein, 1049 aa, synthetic construct
  REGION 1..1049: note = Variant of cytochrome P450
MTIKEMPQPKTFGELKNLPLLNTDKPVQALMRIADELGEIFKFEAPGSVTRFLSSQRLIKEACDESRFDKNLSQSLKFARAFLGDGLFTSWTHEPNWKKAHNILGPSFSQRAMKRYHAMMVDIAVQLVQKWERLNADEHIEVSEDMTRLTLDTIGLCGFNYRFNSFYRDQPHPFIVSVVRALDEVMNKLQRANPDDPAYDENKRQCQEDIKVMNDYVDKIIADRKARGEQSHDLLTQMLNGKDPETGEPLDDGNIRYQIITFLIAGHETTSGLLSFALYFLVKNPHVLQKVAEEAARVLVDPVPSYKQVKQLKYVGMVLNEALRLWPTGPAFSLYAKEDTVLGGEYPLTKGDEVMVLIPQLHRDKTIWGDDVEEFRPERFENPSAIPQHAFKPFGNGQRACIGQQFALHEATLVLGMMLKHFDFEDHTNYELVIKERLTLKPEGFVVKAKSKGIPLGGIPSPSTEQSAKKVRKKAENAHNTPLLVLYGSNAGTAEGTARDLADIAMSKGFAPQVATLDSHAGNLPREGAVLIVTASYNGHPPDNAKQFVDWLDQASADEVKGVRYSVFGCGDKNWAATYQKVPAFIDETLAAKGAENIADRGEADASDDFEGAYEEWSDHMWSDVAAYFNLDIENSEDNKSTLSLQFVDSAADMPLAKMHGAFSTNVVASKELQQPGSARSTRHLEIELPKEASYQEGDHLGVIPRNYEGIVNRVTARFGLSASQQIRLEAEEEKLAHLPLAKTVSVEELLQYVELQDPVTRTQLRAMAAKTVCPPHKVELEALLEKQAYKEQVLAKRLTMLELLEKYPACEMKFSEFIALLPSIRPRYYSISSSPRVDEKQASITVSVVSGPAWSGYGEYKGIASNYLAELQEGDTITCFISTDQSEFTLPKDPETPLIMVGPGTGVAPFRGFVQARKQLKEQGQSLGEAHLYFGCRSPHEDYLYQEELENAQSEGIITLHTAFSRMPNQPKTYVQHVMEQDGKKLIELLDQGAHFYICGDGSQMAPAVEATLMKSYADVHQVSEADARLWLQQLEEKGRYAKDVWAG

SEQ ID NO: 401 - DNA, 3147 bp, synthetic construct
  misc_feature 1..3147: note = Variant of cytochrome P450
  source 1..3147: mol_type = other DNA
atgacaattaaggaaatgcctcagcctaagacgtttggagaacttaaaaatttaccgttattaaacacagataaaccggttcaagctttgatgcgtattgcggatgaattaggagaaatctttaaattcgaggcgcctggtagcgtaacgcgctttttatcaagtcagcgtctaattaaagaagcatgcgatgaaagtcgctttgataaaaacttaagtcaatcgctgaaatttgggcgtgattttctgggagacgggttattcacaagctggacgcatgaaccgaattggaaaaaagcgcataatatcttaggcccaagctttagtcagcgtgcaatgaaacgttatcatgcgatgatggtcgatatcgccgtgcagcttgttcaaaagtgggagcgtctaaatgcagatgagcatattgaagtatcggaagacatgacacgtttaacgctggatacaattggtctttgcggcttcaactatcgctttaacagcttttaccgagatcagcctcatccatttattgtgagtgttgtgcgtgcactggatgaagtaatgaacaagctgcagcgagcaaatccagacgacccagcttatgatgaaaacaagcgccagtgtcaagaagatatcaaggtgatgaacgactatgtcgataaaattattgcagatcgcaaagcaaggggtgaacaaagccatgatttattaacgcagatgctaaacggaaaagatccagaaacgggtgagccgcttgatgacgggaacattcgttatcaaattattacattcttaatcgcgggacacgaaacaacaagtggtcttttatcatttgcgctgtatttcttagtgaaaaatccacatgtattacaaaaagtagcagaagaagcagcacgagttctagtagatcctgttccaagctacaaacaagtcaaacagcttaaatatgtcggcatggtcttaaacgaagcgctgcgcttatggccaactggtcctgcgttttccctatatgcaaaagaagatacggtgcttggaggagaatatcctttaaccaaaggcgacgaagtaatggttctgattcctcagcttcaccgtgataaaacaatttggggagacgatgtggaggagttccgtccagagcgttttgaaaatccaagtgcgattccgcagcatgcgtttaaaccgtttggaaacggtcagcgtgcgtgtatcggtcagcagttcgctcttcatgaagcaacgctggtacttggtatgatgctaaaacactttgactttgaagatcatacaaactacgagctcgttattggcgaacgcttaacgttaaaacctgaaggctttgtggtaaaagcaaaatcgaaaggcattccgcttggcctgattccttcacctagcactgaacagtctgctaaaaaagtacgcaaaaaggcagaaaacgctcataatacgccgctgcttgtgctatacggttcaaatgcgggaacagctgaaggaacggcgcgtgatttagcagatattgcaatgagcaaaggatttgcaccgcaggtcgcaacgcttgattcacacgccggaaatcttccgcgcgaaggagctgtattaattgtaacggcgtcttataacggtcatccgcctgataacgcaaagcaatttgtcgactggttagaccaagcgtctgctgatgaagtaaaaggcgttcgctactccgtatttggatgcggcgataaaaactgggctgcgacgtatcaaaaagtgcctgcttttatcgatgaaacgcttgccgctaaaggggcagaaaacatcgctgaccgcggtgaagcagatgcaagcgacgactttgaaggcacgtatgaagaatggagtgatcatatgtggagtgacgtagcagcctactttaacctcgacattgaaaacagtgaagataataaatctactctttcacttcaatttgtcgacagcgccgcggatatgccgcttgcgaaaatgcacggtgcgttttcaacgaacgtcgtagcaagcaaagaacttcaacagccaggcagtgcacgaagcacgcgacatcttgaaattgaacttccaaaagaagcttcttatcaagaaggagatcatttaggtgttattcctcgcaactatgaaggaatagtaaaccgtgtaacagcaaggttcggcctaagcgcatcacagcaaatccgtctggaagcagaagaagaaaaattagctcatttgccactcgctaaaacagtatccgtagaagagcttctgcaatacgtggagcttcaagatcctgttacgcgcacgcagcttcgcgcaatggctgctaaaacggtctgcccgccgcataaagtagagcttgaagccttgcttgaaaagcaagcctacaaagaacaagtgctggcaaaacgtttaacaatgcttgaactgcttgaaaaatacccggcgtgtgaaatgaaattcagcgaatttatcgcccttctgccaagcatacgcccgcgctattactcgatttcttcatcacctcgtgtcgatgaaaaacaagcaagcatcacggtcagcgttgtctcaggaccggcgtggagcggatatggagaatataaaggaattgcgtcgaactatcttgccgagctgcaagaaggagatacgattacgtgctttatttccacagatcagtcagaatttacgctgccaaaagaccctgaaacgccgcttatcatggtcggaccgggaacaggcgtcgcgccgtttagaggctttgtgcaggcgcgcaaacagctaaaagaacaaggacagtcacttggagaagcacatttatacttcggctgccgttcacctcatgaagactatctgtatcaagaagagcttgaaaacgcccaaagcgaaggcatcattacgcttcataccgctttttctcgcatgccaaatcagccgaaaacatacgttcagcacgtaatggaacaagacggcaagaaattgattgaacttcttgatcaaggagcgcacttctatatttgcggagacggaagccaaatggcacctgccgttgaagcaacgcttatgaaaagctatgctgacgttcaccaagtgagtgaagcagacgctcgcttatggctgcagcagctagaagaaaaaggccgatacgcaaaagacgtgtgggctggg

SEQ ID NO: 402 - protein, 1049 aa, synthetic construct
  REGION 1..1049: note = Variant of cytochrome P450
MTIKEMPQPKTFGELKNLPLLNTDKPVQALMRIADELGEIFKFEAPGSVTRFLSSQRLIKEACDESRFDKNLSQSLKFGRDFLGDGLFTSWTHEPNWKKAHNILGPSFSQRAMKRYHAMMVDIAVQLVQKWERLNADEHIEVSEDMTRLTLDTIGLCGFNYRFNSFYRDQPHPFIVSVVRALDEVMNKLQRANPDDPAYDENKRQCQEDIKVMNDYVDKIIADRKARGEQSHDLLTQMLNGKDPETGEPLDDGNIRYQIITFLIAGHETTSGLLSFALYFLVKNPHVLQKVAEEAARVLVDPVPSYKQVKQLKYVGMVLNEALRLWPTGPAFSLYAKEDTVLGGEYPLTKGDEVMVLIPQLHRDKTIWGDDVEEFRPERFENPSAIPQHAFKPFGNGQRACIGQQFALHEATLVLGMMLKHFDFEDHTNYELVIGERLTLKPEGFVVKAKSKGIPLGLIPSPSTEQSAKKVRKKAENAHNTPLLVLYGSNAGTAEGTARDLADIAMSKGFAPQVATLDSHAGNLPREGAVLIVTASYNGHPPDNAKQFVDWLDQASADEVKGVRYSVFGCGDKNWAATYQKVPAFIDETLAAKGAENIADRGEADASDDFEGTYEEWSDHMWSDVAAYFNLDIENSEDNKSTLSLQFVDSAADMPLAKMHGAFSTNVVASKELQQPGSARSTRHLEIELPKEASYQEGDHLGVIPRNYEGIVNRVTARFGLSASQQIRLEAEEEKLAHLPLAKTVSVEELLQYVELQDPVTRTQLRAMAAKTVCPPHKVELEALLEKQAYKEQVLAKRLTMLELLEKYPACEMKFSEFIALLPSIRPRYYSISSSPRVDEKQASITVSVVSGPAWSGYGEYKGIASNYLAELQEGDTITCFISTDQSEFTLPKDPETPLIMVGPGTGVAPFRGFVQARKQLKEQGQSLGEAHLYFGCRSPHEDYLYQEELENAQSEGIITLHTAFSRMPNQPKTYVQHVMEQDGKKLIELLDQGAHFYICGDGSQMAPAVEATLMKSYADVHQVSEADARLWLQQLEEKGRYAKDVWAG

SEQ ID NO: 403 - DNA, 3147 bp, synthetic construct
  misc_feature 1..3147: note = Variant of cytochrome P450
  source 1..3147: mol_type = other DNA
atgacaattaaggaaatgcctcagcctaagacgtttggagaacttaaaaatttaccgttattaaacacagataaaccggttcaagctttgatgcgtattgcggatgaattaggagaaatctttaaattcgaggcgcctggtagcgtaacgcgctttttatcaagtcagcgtctaattaaagaagcatgcgatgaaagtcgctttgataaaaacttaagtcaatcgctgaaatttgcccgtgattttctgggagacgggttatttacaagctggacgcatgaaccgaattggaaaaaagcgcataatatcttaggcccaagctttagtcagcgtgcaatgaaacgttatcatgcgatgatggtcgatatcgccgtgcagcttgttcaaaagtgggagcgtctaaatgcagatgagcatattgaagtatcggaagacatgacacgtttaacgctggatacaattggtctttgcggcttcaactatcgctttaacagcttttaccgagatcagcctcatccatttattgtgagtgttgtgcgtgcactggatgaagtaatgaacaagctgcagcgagcaaatccagacgacccagcttatgatgaaaacaagcgccagtttcaagaagatatcaaggtgatgaacgactatgtcgataaaattattgcagatcgcaaagcaaggggtgaacaaagccatgatttattaacgcagatgctaaacggaaaagatccagaaacgggtgagccgcttgatgacgggaacattcgttatcaaattattacattcttaatcgcgggacacgaaacaacaagtggtcttttatcatttgcgctgtatttcttagtgaaaaatccacatgtattacaaaaagtagcagaagaagcagcacgagttctagtagatcctgttccaagctacaaacaagtcaaacagcttaaatatgtcggcatggtcttaaacgaagcgctgcgcttatggccaactggtcctgcgttttccctatatgcaaaagaagatacggtgcttggaggagaatatcctttaaccaaaggcgacgaagtaatggttctgattcctcagcttcaccgtgataaaacaatttggggagacgatgtggaggagttccgtccagagcgttttgaaaatccaagtgcgattccgcagcatgcgtttaaaccgtttggaaacggtcagcgtgcgtgtatcggtcagcagttcgctcttcatgaagcaacgctggtacttggtatgatgctaaaacactttgactttgaagatcatacaaactacgagctcgttattggcgaacgcttaacgttaaaacctgaaggctttgtggtaaaagcaaaatcgaaaggcattccgcttggcggtattccttcacctagcactgaacagtctgctaaaaaagtacgcaaaaaggcagaaaacgctcataatacgccgctgcttgtgctatacggttcaaatgcgggaacagctgaaggaacggcgcgtgatttagcagatattgcaatgagcaaaggatttgcaccgcaggtcgcaacgcttgattcacacgccggaaatcttccgcgcgaaggagctgtattaattgtaacggcgtcttataacggtcatccgcctgataacgcaaagcaatttgtcgactggttagaccaagcgtctgctgatgaagtaaaaggcgttcgctactccgtatttggatgcggcgataaaaactgggctgcgacgtatcaaaaagtgcctgcttttatcgatgaaacgcttgccgctaaaggggcagaaaacatcgctgaccgcggtgaagcagatgcaagcgacgactttgaaggcacgtatgaagaatggagtgatcatatgtggagtgacgtagcagcctactttaacctcgacattgaaaacagtgaagataataaatctactctttcacttcaatttgtcgacagcgccgcggatatgccgcttgcgaaaatgcacggtgcgttttcaacgaacgtcgtagcaagcaaagaacttcaacagccaggcagtgcacgaagcacgcgacatcttgaaattgaacttccaaaagaagcttcttatcaagaaggagatcatttaggtgttattcctcgcaactatgaaggaatagtaaaccgtgtaacagcaaggttcggcctaagcgcatcacagcaaatccgtctggaagcagaagaagaaaaattagctcatttgccactcgctaaaacagtatccgtagaagagcttctgcaatacgtggagcttcaagatcctgttacgcgcacgcagcttcgcgcaatggctgctaaaacggtctgcccgccgcataaagtagagcttgaagccttgcttgaaaagcaagcctacaaagaacaagtgctggcaaaacgtttaacaatgcttgaactgcttgaaaaatacccggcgtgtgaaatgaaattcagcgaatttatcgcccttctgccaagcatacgcccgcgctattactcgatttcttcatcacctcgtgtcgatgaaaaacaagcaagcatcacggtcagcgttgtctcaggaccggcgtggagcggatatggagaatataaaggaattgcgtcgaactatcttgccgagctgcaagaaggagatacgattacgtgctttatttccacagatcagtcagaatttacgctgccaaaagaccctgaaacgccgcttatcatggtcggaccgggaacaggcgtcgcgccgtttagaggctttgtgcaggcgcgcaaacagctaaaagaacaaggacagtcacttggagaagcacatttatacttcggctgccgttcacctcatgaagactatctgtatcaagaagagcttgaaaacgcccaaagcgaaggcatcattacgcttcataccgctttttctcgcatgccaaatcagccgaaaacatacgttcagcacgtaatggaacaagacggcaagaaattgattgaacttcttgatcaaggagcgcacttctatatttgcggagacggaagccaaatggcacctgccgttgaagcaacgcttatgaaaagctatgctgacgttcaccaagtgagtgaagcagacgctcgcttatggctgcagcagctagaagaaaaaggccgatacgcaaaagacgtgtgggctggg

SEQ ID NO: 404 - protein, 1049 aa, synthetic construct
  REGION 1..1049: note = Variant of cytochrome P450
MTIKEMPQPKTFGELKNLPLLNTDKPVQALMRIADELGEIFKFEAPGSVTRFLSSQRLIKEACDESRFDKNLSQSLKFARDFLGDGLFTSWTHEPNWKKAHNILGPSFSQRAMKRYHAMMVDIAVQLVQKWERLNADEHIEVSEDMTRLTLDTIGLCGFNYRFNSFYRDQPHPFIVSVVRALDEVMNKLQRANPDDPAYDENKRQFQEDIKVMNDYVDKIIADRKARGEQSHDLLTQMLNGKDPETGEPLDDGNIRYQIITFLIAGHETTSGLLSFALYFLVKNPHVLQKVAEEAARVLVDPVPSYKQVKQLKYVGMVLNEALRLWPTGPAFSLYAKEDTVLGGEYPLTKGDEVMVLIPQLHRDKTIWGDDVEEFRPERFENPSAIPQHAFKPFGNGQRACIGQQFALHEATLVLGMMLKHFDFEDHTNYELVIGERLTLKPEGFVVKAKSKGIPLGGIPSPSTEQSAKKVRKKAENAHNTPLLVLYGSNAGTAEGTARDLADIAMSKGFAPQVATLDSHAGNLPREGAVLIVTASYNGHPPDNAKQFVDWLDQASADEVKGVRYSVFGCGDKNWAATYQKVPAFIDETLAAKGAENIADRGEADASDDFEGTYEEWSDHMWSDVAAYFNLDIENSEDNKSTLSLQFVDSAADMPLAKMHGAFSTNVVASKELQQPGSARSTRHLEIELPKEASYQEGDHLGVIPRNYEGIVNRVTARFGLSASQQIRLEAEEEKLAHLPLAKTVSVEELLQYVELQDPVTRTQLRAMAAKTVCPPHKVELEALLEKQAYKEQVLAKRLTMLELLEKYPACEMKFSEFIALLPSIRPRYYSISSSPRVDEKQASITVSVVSGPAWSGYGEYKGIASNYLAELQEGDTITCFISTDQSEFTLPKDPETPLIMVGPGTGVAPFRGFVQARKQLKEQGQSLGEAHLYFGCRSPHEDYLYQEELENAQSEGIITLHTAFSRMPNQPKTYVQHVMEQDGKKLIELLDQGAHFYICGDGSQMAPAVEATLMKSYADVHQVSEADARLWLQQLEEKGRYAKDVWAG

SEQ ID NO: 405 - DNA, 3147 bp, synthetic construct
  misc_feature 1..3147: note = Variant of cytochrome P450
  source 1..3147: mol_type = other DNA
atgacaattaaggaaatgcctcagcctaagacgtttggagaacttaaaaatttaccgttattaaacacagataaaccggttcaagctttgatgcgtattgcggatgaattaggagaaatctttaaattcgaggcgcctggtagcgtaacgcgctttttatcaagtcagcgtctaattaaagaagcatgcgatgaatcacgctttgataaaaacttaagtcaatcgctgaaatttgggcgtgattttctgggagacgggttatttacaagctggacgcatgaaccgaattggaaaaaagcgcataatatcttaggcccaagctttagtcagcgtgcaatgaaacgttatcatgcgatgatggtcgatatcgccgtgcagcttgttcaaaagtgggagcgtctaaatgcagatgagcatattgaagtatcggaagacatgacacgtttaacgctggatacaattggtctttgcggcttcaactatcgctttaacagcttttaccgagatcagcctcatccatttattgtgagtgttgtgcgtgcactggatgaagtaatgaacaagctgcagcgagcaaatccagacgacccagcttatgatgaaaacaagcgccagtttcaagaagatatcaaggtgatgaacgactatgtcgataaaattattgcagatcgcaaagcaaggggtgaacaaagccatgatttattaacgcagatgctaaacggaaaagatccagaaacgggtgagccgcttgatgacgggaacattcgttatcaaattattacattcttaatcgcgggacacgaaacaacaagtggtcttttatcatttgcgctgtatttcttagtgaaaaatccacatgtattacaaaaagtagcagaagaagcagcacgagttctagtagatcctgttccaagctacaaacaagtcaaacagcttaaatatgtcggcatggtcttaaacgaagcgctgcgcttatggccaactggtcctgcgttttccctatatgcaaaagaagatacggtgcttggaggagaatatcctttaaccaaaggcgacgaagtaatggttctgattcctcagcttcaccgtgataaaacaatttggggagacgatgtggaggagttccgtccagagcgttttgaaaatccaagtgcgattccgcagcatgcgtttaaaccgtttggaaacggtcagcgtgcgtgtatcggtcagcagttcgctcttcatgaagcaacgctggtacttggtatgatgctaaaacactttgactttgaagatcatacaaactacgagctcgttattaaggaacgcttaacgttaaaacctgaaggctttgtggtaaaagcaaaatcgaaaggcattccgcttggcggcattccttcacctagcactgaacagtctgctaaaaaagtacgcaaaaaggcagaaaacgctcataatacgccgctgcttgtgctatacggttcaaatgcgggaacagctgaaggaacggcgcgtgatttagcagatattgcaatgagcaaaggatttgcaccgcaggtcgcaacgcttgattcacacgccggaaatcttccgcgcgaaggagctgtattaattgtaacggcgtcttataacggtcatccgcctgataacgcaaagcaatttgtcgactggttagaccaagcgtctgctgatgaagtaaaaggcgttcgctactccgtatttggatgcggcgataaaaactgggctgcgacgtatcaaaaagtgcctgcttttatcgatgaaacgcttgccgctaaaggggcagaaaacatcgctgaccgcggtgaagcagatgcaagcgacgactttgaaggcacgtatgaagaatggagtgatcatatgtggagtgacgtagcagcctactttaacctcgacattgaaaacagtgaagataataaatctactctttcacttcaatttgtcgacagcgccgcggatatgccgcttgcgaaaatgcacggtgcgttttcaacgaacgtcgtagcaagcaaagaacttcaacagccaggcagtgcacgaagcacgcgacatcttgaaattgaacttccaaaagaagcttcttatcaagaaggagatcatttaggtgttattcctcgcaactatgaaggaatagtaaaccgtgtaacagcaaggttcggcctaagcgcatcacagcaaatccgtctggaagcagaagaagaaaaattagctcatttgccactcgctaaaacagtatccgtagaagagcttctgcaatacgtggagcttcaagatcctgttacgcgcacgcagcttcgcgcaatggctgctaaaacggtctgcccgccgcataaagtagagcttgaagccttgcttgaaaagcaagcctacaaagaacaagtgctggcaaaacgtttaacaatgcttgaactgcttgaaaaatacccggcgtgtgaaatgaaattcagcgaatttatcgcccttctgccaagcatacgcccgcgctattactcgatttcttcatcacctcgtgtcgatgaaaaacaagcaagcatcacggtcagcgttgtctcaggaccggcgtggagcggatatggagaatataaaggaattgcgtcgaactatcttgccgagctgcaagaaggagatacgattacgtgctttatttccacagatcagtcagaatttacgctgccaaaagaccctgaaacgccgcttatcatggtcggaccgggaacaggcgtcgcgccgtttagaggctttgtgcaggcgcgcaaacagctaaaagaacaaggacagtcacttggagaagcacatttatacttcggctgccgttcacctcatgaagactatctgtatcaagaagagcttgaaaacgcccaaagcgaaggcatcattacgcttcataccgctttttctcgcatgccaaatcagccgaaaacatacgttcagcacgtaatggaacaagacggcaagaaattgattgaacttcttgatcaaggagcgcacttctatatttgcggagacggaagccaaatggcacctgccgttgaagcaacgcttatgaaaagctatgctgacgttcaccaagtgagtgaagcagacgctcgcttatggctgcagcagctagaagaaaaaggccgatacgcaaaagacgtgtgggctggg

SEQ ID NO: 406 - protein, 1049 aa, synthetic construct
  REGION 1..1049: note = Variant of cytochrome P450
MTIKEMPQPKTFGELKNLPLLNTDKPVQALMRIADELGEIFKFEAPGSVTRFLSSQRLIKEACDESRFDKNLSQSLKFGRDFLGDGLFTSWTHEPNWKKAHNILGPSFSQRAMKRYHAMMVDIAVQLVQKWERLNADEHIEVSEDMTRLTLDTIGLCGFNYRFNSFYRDQPHPFIVSVVRALDEVMNKLQRANPDDPAYDENKRQFQEDIKVMNDYVDKIIADRKARGEQSHDLLTQMLNGKDPETGEPLDDGNIRYQIITFLIAGHETTSGLLSFALYFLVKNPHVLQKVAEEAARVLVDPVPSYKQVKQLKYVGMVLNEALRLWPTGPAFSLYAKEDTVLGGEYPLTKGDEVMVLIPQLHRDKTIWGDDVEEFRPERFENPSAIPQHAFKPFGNGQRACIGQQFALHEATLVLGMMLKHFDFEDHTNYELVIKERLTLKPEGFVVKAKSKGIPLGGIPSPSTEQSAKKVRKKAENAHNTPLLVLYGSNAGTAEGTARDLADIAMSKGFAPQVATLDSHAGNLPREGAVLIVTASYNGHPPDNAKQFVDWLDQASADEVKGVRYSVFGCGDKNWAATYQKVPAFIDETLAAKGAENIADRGEADASDDFEGTYEEWSDHMWSDVAAYFNLDIENSEDNKSTLSLQFVDSAADMPLAKMHGAFSTNVVASKELQQPGSARSTRHLEIELPKEASYQEGDHLGVIPRNYEGIVNRVTARFGLSASQQIRLEAEEEKLAHLPLAKTVSVEELLQYVELQDPVTRTQLRAMAAKTVCPPHKVELEALLEKQAYKEQVLAKRLTMLELLEKYPACEMKFSEFIALLPSIRPRYYSISSSPRVDEKQASITVSVVSGPAWSGYGEYKGIASNYLAELQEGDTITCFISTDQSEFTLPKDPETPLIMVGPGTGVAPFRGFVQARKQLKEQGQSLGEAHLYFGCRSPHEDYLYQEELENAQSEGIITLHTAFSRMPNQPKTYVQHVMEQDGKKLIELLDQGAHFYICGDGSQMAPAVEATLMKSYADVHQVSEADARLWLQQLEEKGRYAKDVWAG

SEQ ID NO: 407 - DNA, 3147 bp, synthetic construct
  misc_feature 1..3147: note = Variant of cytochrome P450
  source 1..3147: mol_type = other DNA
atgacaattaaggaaatgcctcagcctaagacgtttggagaacttaaaaatttaccgttattaaacacagataaaccggttcaagctttgatgcgtattgcggatgaattaggagaaatctttaaattcgaggcgcctggtagcgtaacgcgctttttatcaagtcagcgtctaattaaagaagcatgcgatgaacgtcgctttgataaaaacttaagtcaatcgctgaaatttggccgtgattttctgggagacgggttatttacaagctggacgcatgaaccgaattggaaaaaagcgcataatatcttaggcccaagctttagtcagcgtgcaatgaaacgttatcatgcgatgatggtcgatatcgccgtgcagcttgttcaaaagtgggagcgtctaaatgcagatgagcatattgaagtatcggaagacatgacacgtttaacgctggatacaattggtctttgcggcttcaactatcgctttaacagcttttaccgagatcagcctcatccatttattgtgagtgttgtgcgtgcactggatgaagtaatgaacaagctgcagcgagcaaatccagacgacccagcttatgatgaaaacaagcgccagtttcaagaagatatcaaggtgatgaacgactatgtcgataaaattattgcagatcgcaaagcaaggggtgaacaaagccatgatttattaacgcagatgctaaacggaaaagatccagaaacgggtgagccgcttgatgacgggaacattcgttatcaaattattacattcttaatcgcgggacacgaaacaacaagtggtcttttatcatttgcgctgtatttcttagtgaaaaatccacatgtattacaaaaagtagcagaagaagcagcacgagttctagtagatcctgttccaagctacaaacaagtcaaacagcttaaatatgtcggcatggtcttaaacgaagcgctgcgcttatggccaactggtcctgcgttttccctatatgcaaaagaagatacggtgcttggaggagaatatcctttaaccaaaggcgacgaagtaatggttctgattcctcagcttcaccgtgataaaacaatttggggagacgatgtggaggagttccgtccagagcgttttgaaaatccaagtgcgattccgcagcatgcgtttaaaccgtttggaaacggtcagcgtgcgtgtatcggtcagcagttcgctcttcatgaagcaacgctggtacttggtatgatgctaaaacactttgactttgaagatcatacaaactacgagctcgttattggcgaacgcttaacgttaaaacctgaaggctttgtggtaaaagcaaaatcgaaaggcattccgcttggcggtattccttcacctagcactgaacagtctgctaaaaaagtacgcaaaaaggcagaaaacgctcataatacgccgctgcttgtgctatacggttcaaatgcgggaacagctgaaggaacggcgcgtgatttagcagatattgcaatgagcaaaggatttgcaccgcaggtcgcaacgcttgattcacacgccggaaatcttccgcgcgaaggagctgtattaattgtaacggcgtcttataacggtcatccgcctgataacgcaaagcaatttgtcgactggttagaccaagcgtctgctgatgaagtaaaaggcgttcgctactccgtatttggatgcggcgataaaaactgggctgcgacgtatcaaaaagtgcctgcttttatcgatgaaacgcttgccgctaaaggggcagaaaacatcgctgaccgcggtgaagcagatgcaagcgacgactttgaaggcacatatgaagaatggagtgatcatatgtggagtgacgtagcagcctactttaacctcgacattgaaaacagtgaagataataaatctactctttcacttcaatttgtcgacagcgccgcggatatgccgcttgcgaaaatgcacggtgcgttttcaacgaacgtcgtagcaagcaaagaacttcaacagccaggcagtgcacgaagcacgcgacatcttgaaattgaacttccaaaagaagcttcttatcaagaaggagatcatttaggtgttattcctcgcaactatgaaggaatagtaaaccgtgtaacagcaaggttcggcctaagcgcatcacagcaaatccgtctggaagcagaagaagaaaaattagctcatttgccactcgctaaaacagtatccgtagaagagcttctgcaatacgtggagcttcaagatcctgttacgcgcacgcagcttcgcgcaatggctgctaaaacggtctgcccgccgcataaagtagagcttgaagccttgcttgaaaagcaagcctacaaagaacaagtgctggcaaaacgtttaacaatgcttgaactgcttgaaaaatacccggcgtgtgaaatgaaattcagcgaatttatcgcccttctgccaagcatacgcccgcgctattactcgatttcttcatcacctcgtgtcgatgaaaaacaagcaagcatcacggtcagcgttgtctcaggaccggcgtggagcggatatggagaatataaaggaattgcgtcgaactatcttgccgagctgcaagaaggagatacgattacgtgctttatttccacagatcagtcagaatttacgctgccaaaagaccctgaaacgccgcttatcatggtcggaccgggaacaggcgtcgcgccgtttagaggctttgtgcaggcgcgcaaacagctaaaagaacaaggacagtcacttggagaagcacatttatacttcggctgccgttcacctcatgaagactatctgtatcaagaagagcttgaaaacgcccaaagcgaaggcatcattacgcttcataccgctttttctcgcatgccaaatcagccgaaaacatacgttcagcacgtaatggaacaagacggcaagaaattgattgaacttcttgatcaaggagcgcacttctatatttgcggagacggaagccaaatggcacctgccgttgaagcaacgcttatgaaaagctatgctgacgttcaccaagtgagtgaagcagacgctcgcttatggctgcagcagctagaagaaaaaggccgatacgcaaaagacgtgtgggctggg

SEQ ID NO: 408 - protein, 1049 aa, synthetic construct
  REGION 1..1049: note = Variant of cytochrome P450
MTIKEMPQPKTFGELKNLPLLNTDKPVQALMRIADELGEIFKFEAPGSVTRFLSSQRLIKEACDERRFDKNLSQSLKFGRDFLGDGLFTSWTHEPNWKKAHNILGPSFSQRAMKRYHAMMVDIAVQLVQKWERLNADEHIEVSEDMTRLTLDTIGLCGFNYRFNSFYRDQPHPFIVSVVRALDEVMNKLQRANPDDPAYDENKRQFQEDIKVMNDYVDKIIADRKARGEQSHDLLTQMLNGKDPETGEPLDDGNIRYQIITFLIAGHETTSGLLSFALYFLVKNPHVLQKVAEEAARVLVDPVPSYKQVKQLKYVGMVLNEALRLWPTGPAFSLYAKEDTVLGGEYPLTKGDEVMVLIPQLHRDKTIWGDDVEEFRPERFENPSAIPQHAFKPFGNGQRACIGQQFALHEATLVLGMMLKHFDFEDHTNYELVIGERLTLKPEGFVVKAKSKGIPLGGIPSPSTEQSAKKVRKKAENAHNTPLLVLYGSNAGTAEGTARDLADIAMSKGFAPQVATLDSHAGNLPREGAVLIVTASYNGHPPDNAKQFVDWLDQASADEVKGVRYSVFGCGDKNWAATYQKVPAFIDETLAAKGAENIADRGEADASDDFEGTYEEWSDHMWSDVAAYFNLDIENSEDNKSTLSLQFVDSAADMPLAKMHGAFSTNVVASKELQQPGSARSTRHLEIELPKEASYQEGDHLGVIPRNYEGIVNRVTARFGLSASQQIRLEAEEEKLAHLPLAKTVSVEELLQYVELQDPVTRTQLRAMAAKTVCPPHKVELEALLEKQAYKEQVLAKRLTMLELLEKYPACEMKFSEFIALLPSIRPRYYSISSSPRVDEKQASITVSVVSGPAWSGYGEYKGIASNYLAELQEGDTITCFISTDQSEFTLPKDPETPLIMVGPGTGVAPFRGFVQARKQLKEQGQSLGEAHLYFGCRSPHEDYLYQEELENAQSEGIITLHTAFSRMPNQPKTYVQHVMEQDGKKLIELLDQGAHFYICGDGSQMAPAVEATLMKSYADVHQVSEADARLWLQQLEEKGRYAKDVWAG

SEQ ID NO: 409 - DNA, 3147 bp, synthetic construct
  misc_feature 1..3147: note = Variant of cytochrome P450
  source 1..3147: mol_type = other DNA
atgacaattaaggaaatgcctcagcctaagacgtttggagaacttaaaaatttaccgttattaaacacagataaaccggttcaagctttgatgcgtattgcggatgaattaggagaaatctttaaattcgaggcgcctggtagcgtaacgcgctttttatcaagtcagcgtctaattaaagaagcatgcgatgaatcacgctttgataaaaacttaagtcaatcgctgaaatttgggcgtgattttctgggagacgggttatttacaagctggacgcatgaaccgaattggaaaaaagcgcataatatcttaggcccaagctttagtcagcgtgcaatgaaacgttatcatgcgatgatggtcgatatcgccgtgcagcttgttcaaaagtgggagcgtctaaatgcagatgagcatattgaagtatcggaagacatgacacgtttaacgctggatacaattggtctttgcggcttcaactatcgctttaacagcttttaccgagatcagcctcatccatttattgtgagtgttgtgcgtgcactggatgaagtaatgaacaagctgcagcgagcaaatccagacgacccagcttatgatgaaaacaagcgccagtgtcaagaagatatcaaggtgatgaacgactatgtcgataaaattattgcagatcgcaaagcaaggggtgaacaaagccatgatttattaacgcagatgctaaacggaaaagatccagaaacgggtgagccgcttgatgacgggaacattcgttatcaaattattacattcttaatcgcgggacacgaaacaacaagtggtcttttatcatttgcgctgtatttcttagtgaaaaatccacatgtattacaaaaagtagcagaagaagcagcacgagttctagtagatcctgttccaagctacaaacaagtcaaacagcttaaatatgtcggcatggtcttaaacgaagcgctgcgcttatggccaactggtcctgcgttttccctatatgcaaaagaagatacggtgcttggaggagaatatcctttaaccaaaggcgacgaagtaatggttctgattcctcagcttcaccgtgataaaacaatttggggagacgatgtggaggagttccgtccagagcgttttgaaaatccaagtgcgattccgcagcatgcgtttaaaccgtttggaaacggtcagcgtgcgtgtatcggtcagcagttcgctcttcatgaagcaacgctggtacttggtatgatgctaaaacactttgactttgaagatcatacaaactacgagctcgttattaaggaacgcttaacgttaaaacctgaaggctttgtggtaaaagcaaaatcgaaaggcattccgcttggcggtattccttcacctagcactgaacagtctgctaaaaaagtacgcaaaaaggcagaaaacgctcataatacgccgctgcttgtgctatacggttcaaatgcgggaacagctgaaggaacggcgcgtgatttagcagatattgcaatgagcaaaggatttgcaccgcaggtcgcaacgcttgattcacacgccggaaatcttccgcgcgaaggagctgtattaattgtaacggcgtcttataacggtcatccgcctgataacgcaaagcaatttgtcgactggttagaccaagcgtctgctgatgaagtaaaaggcgttcgctactccgtatttggatgcggcgataaaaactgggctgcgacgtatcaaaaagtgcctgcttttatcgatgaaacgcttgccgctaaaggggcagaaaacatcgctgaccgcggtgaagcagatgcaagcgacgactttgaaggcacatatgaagaatggagtgatcatatgtggagtgacgtagcagcctactttaacctcgacattgaaaacagtgaagataataaatctactctttcacttcaatttgtcgacagcgccgcggatatgccgcttgcgaaaatgcacggtgcgttttcaacgaacgtcgtagcaagcaaagaacttcaacagccaggcagtgcacgaagcacgcgacatcttgaaattgaacttccaaaagaagcttcttatcaagaaggagatcatttaggtgttattcctcgcaactatgaaggaatagtaaaccgtgtaacagcaaggttcggcctaagcgcatcacagcaaatccgtctggaagcagaagaagaaaaattagctcatttgccactcgctaaaacagtatccgtagaagagcttctgcaatacgtggagcttcaagatcctgttacgcgcacgcagcttcgcgcaatggctgctaaaacggtctgcccgccgcataaagtagagcttgaagccttgcttgaaaagcaagcctacaaagaacaagtgctggcaaaacgtttaacaatgcttgaactgcttgaaaaatacccggcgtgtgaaatgaaattcagcgaatttatcgcccttctgccaagcatacgcccgcgctattactcgatttcttcatcacctcgtgtcgatgaaaaacaagcaagcatcacggtcagcgttgtctcaggaccggcgtggagcggatatggagaatataaaggaattgcgtcgaactatcttgccgagctgcaagaaggagatacgattacgtgctttatttccacagatcagtcagaatttacgctgccaaaagaccctgaaacgccgcttatcatggtcggaccgggaacaggcgtcgcgccgtttagaggctttgtgcaggcgcgcaaacagctaaaagaacaaggacagtcacttggagaagcacatttatacttcggctgccgttcacctcatgaagactatctgtatcaagaagagcttgaaaacgcccaaagcgaaggcatcattacgcttcataccgctttttctcgcatgccaaatcagccgaaaacatacgttcagcacgtaatggaacaagacggcaagaaattgattgaacttcttgatcaaggagcgcacttctatatttgcggagacggaagccaaatggcacctgccgttgaagcaacgcttatgaaaagctatgctgacgttcaccaagtgagtgaagcagacgctcgcttatggctgcagcagctagaagaaaaaggccgatacgcaaaagacgtgtgggctggg

SEQ ID NO: 410 - protein, 1049 aa, synthetic construct
  REGION 1..1049: note = Variant of cytochrome P450
MTIKEMPQPKTFGELKNLPLLNTDKPVQALMRIADELGEIFKFEAPGSVTRFLSSQRLIKEACDESRFDKNLSQSLKFGRDFLGDGLFTSWTHEPNWKKAHNILGPSFSQRAMKRYHAMMVDIAVQLVQKWERLNADEHIEVSEDMTRLTLDTIGLCGFNYRFNSFYRDQPHPFIVSVVRALDEVMNKLQRANPDDPAYDENKRQCQEDIKVMNDYVDKIIADRKARGEQSHDLLTQMLNGKDPETGEPLDDGNIRYQIITFLIAGHETTSGLLSFALYFLVKNPHVLQKVAEEAARVLVDPVPSYKQVKQLKYVGMVLNEALRLWPTGPAFSLYAKEDTVLGGEYPLTKGDEVMVLIPQLHRDKTIWGDDVEEFRPERFENPSAIPQHAFKPFGNGQRACIGQQFALHEATLVLGMMLKHFDFEDHTNYELVIKERLTLKPEGFVVKAKSKGIPLGGIPSPSTEQSAKKVRKKAENAHNTPLLVLYGSNAGTAEGTARDLADIAMSKGFAPQVATLDSHAGNLPREGAVLIVTASYNGHPPDNAKQFVDWLDQASADEVKGVRYSVFGCGDKNWAATYQKVPAFIDETLAAKGAENIADRGEADASDDFEGTYEEWSDHMWSDVAAYFNLDIENSEDNKSTLSLQFVDSAADMPLAKMHGAFSTNVVASKELQQPGSARSTRHLEIELPKEASYQEGDHLGVIPRNYEGIVNRVTARFGLSASQQIRLEAEEEKLAHLPLAKTVSVEELLQYVELQDPVTRTQLRAMAAKTVCPPHKVELEALLEKQAYKEQVLAKRLTMLELLEKYPACEMKFSEFIALLPSIRPRYYSISSSPRVDEKQASITVSVVSGPAWSGYGEYKGIASNYLAELQEGDTITCFISTDQSEFTLPKDPETPLIMVGPGTGVAPFRGFVQARKQLKEQGQSLGEAHLYFGCRSPHEDYLYQEELENAQSEGIITLHTAFSRMPNQPKTYVQHVMEQDGKKLIELLDQGAHFYICGDGSQMAPAVEATLMKSYADVHQVSEADARLWLQQLEEKGRYAKDVWAG

SEQ ID NO: 411 - DNA, 3147 bp, synthetic construct
  misc_feature 1..3147: note = Variant of cytochrome P450
  source 1..3147: mol_type = other DNA
atgacaattaaggaaatgcctcagcctaagacgtttggagaacttaaaaatttaccgttattaaacacagataaaccggttcaagctttgatgcgtattgcggatgaattaggagaaatctttaaattcgaggcgcctggtagcgtaacgcgctttttatcaagtcagcgtctaattaaagaagcatgcgatgaatcacgctttgataaaaacttaagtcaatcgctgaaatttgcccgtgattttctgggagacgggttatttacaagctggacgcatgaaccgaattggaaaaaagcgcataatatcttaggcccaagctttagtcagcgtgcaatgaaacgttatcatgcgatgatggtcgatatcgccgtgcagcttgttcaaaagtgggagcgtctaaatgcagatgagcatattgaagtatcggaagacatgacacgtttaacgctggatacaattggtctttgcggcttcaactatcgctttaacagcttttaccgagatcagcctcatccatttattgtgtcggtagtgcgtgcactggatgaagtaatgaacaagctgcagcgagcaaatccagacgacccagcttatgatgaaaacaagcgccagtgtcaagaagatatcaaggtgatgaacgactatgtcgataaaattattgcagatcgcaaagcaaggggtgaacaaagccatgatttattaacgcagatgctaaacggaaaagatccagaaacgggtgagccgcttgatgacgggaacattcgttatcaaattattacattcttaatcgcgggacacgaaacaacaagtggtcttttatcatttgcgctgtatttcttagtgaaaaatccacatgtattacaaaaagtagcagaagaagcagcacgagttctagtagatcctgttccaagctacaaacaagtcaaacagcttaaatatgtcggcatggtcttaaacgaagcgctgcgcttatggccaactggtcctgcgttttccctatatgcaaaagaagatacggtgcttggaggagaatatcctttaaccaaaggcgacgaagtaatggttctgattcctcagcttcaccgtgataaaacaatttggggagacgatgtggaggagttccgtccagagcgttttgaaaatccaagtgcgattccgcagcatgcgtttaaaccgtttggaaacggtcagcgtgcgtgtatcggtcagcagttcgctcttcatgaagcaacgctggtacttggtatgatgctaaaacactttgactttgaagatcatacaaactacgagctcgttattaaagaaaagttaacgttaaaacctgaaggctttgtggtaaaagcaaaatcgaaaggcattccgcttggcctgattccttcacctagcactgaacagtctgctaaaaaagtacgcaaaaaggcagaaaacgctcataatacgccgctgcttgtgctatacggttcaaatgcgggaacagctgaaggaacggcgcgtgatttagcagatattgcaatgagcaaaggatttgcaccgcaggtcgcaacgcttgattcacacgccggaaatcttccgcgcgaaggagctgtattaattgtaacggcgtcttataacggtcatccgcctgataacgcaaagcaatttgtcgactggttagaccaagcgtctgctgatgaagtaaaaggcgttcgctactccgtatttggatgcggcgataaaaactgggctgcgacgtatcaaaaagtgcctgcttttatcgatgaaacgcttgccgctaaaggggcagaaaacatcgctgaccgcggtgaagcagatgcaagcgacgactttgaaggcgcgtatgaagaatggagtgatcatatgtggagtgacgtagcagcctactttaacctcgacattgaaaacagtgaagataataaatctactctttcacttcaatttgtcgacagcgccgcggatatgccgcttgcgaaaatgcacggtgcgttttcaacgaacgtcgtagcaagcaaagaacttcaacagccaggcagtgcacgaagcacgcgacatcttgaaattgaacttccaaaagaagcttcttatcaagaaggagatcatttaggtgttattcctcgcaactatgaaggaatagtaaaccgtgtaacagcaaggttcggcctaagcgcatcacagcaaatccgtctggaagcagaagaagaaaaattagctcatttgccactcgctaaaacagtatccgtagaagagcttctgcaatacgtggagcttcaagatcctgttacgcgcacgcagcttcgcgcaatggctgctaaaacggtctgcccgccgcataaagtagagcttgaagccttgcttgaaaagcaagcctacaaagaacaagtgctggcaaaacgtttaacaatgcttgaactgcttgaaaaatacccggcgtgtgaaatgaaattcagcgaatttatcgcccttctgccaagcatacgcccgcgctattactcgatttcttcatcacctcgtgtcgatgaaaaacaagcaagcatcacggtcagcgttgtctcaggaccggcgtggagcggatatggagaatataaaggaattgcgtcgaactatcttgccgagctgcaagaaggagatacgattacgtgctttatttccacagatcagtcagaatttacgctgccaaaagaccctgaaacgccgcttatcatggtcggaccgggaacaggcgtcgcgccgtttagaggctttgtgcaggcgcgcaaacagctaaaagaacaaggacagtcacttggagaagcacatttatacttcggctgccgttcacctcatgaagactatctgtatcaagaagagcttgaaaacgcccaaagcgaaggcatcattacgcttcataccgctttttctcgcatgccaaatcagccgaaaacatacgttcagcacgtaatggaacaagacggcaagaaattgattgaacttcttgatcaaggagcgcacttctatatttgcggagacggaagccaaatggcacctgccgttgaagcaacgcttatgaaaagctatgctgacgttcaccaagtgagtgaagcagacgctcgcttatggctgcagcagctagaagaaaaaggccgatacgcaaaagacgtgtgggctggg

SEQ ID NO: 412 - protein, 1049 aa, synthetic construct
  REGION 1..1049: note = Variant of cytochrome P450
MTIKEMPQPKTFGELKNLPLLNTDKPVQALMRIADELGEIFKFEAPGSVTRFLSSQRLIKEACDESRFDKNLSQSLKFARDFLGDGLFTSWTHEPNWKKAHNILGPSFSQRAMKRYHAMMVDIAVQLVQKWERLNADEHIEVSEDMTRLTLDTIGLCGFNYRFNSFYRDQPHPFIVSVVRALDEVMNKLQRANPDDPAYDENKRQCQEDIKVMNDYVDKIIADRKARGEQSHDLLTQMLNGKDPETGEPLDDGNIRYQIITFLIAGHETTSGLLSFALYFLVKNPHVLQKVAEEAARVLVDPVPSYKQVKQLKYVGMVLNEALRLWPTGPAFSLYAKEDTVLGGEYPLTKGDEVMVLIPQLHRDKTIWGDDVEEFRPERFENPSAIPQHAFKPFGNGQRACIGQQFALHEATLVLGMMLKHFDFEDHTNYELVIKEKLTLKPEGFVVKAKSKGIPLGLIPSPSTEQSAKKVRKKAENAHNTPLLVLYGSNAGTAEGTARDLADIAMSKGFAPQVATLDSHAGNLPREGAVLIVTASYNGHPPDNAKQFVDWLDQASADEVKGVRYSVFGCGDKNWAATYQKVPAFIDETLAAKGAENIADRGEADASDDFEGAYEEWSDHMWSDVAAYFNLDIENSEDNKSTLSLQFVDSAADMPLAKMHGAFSTNVVASKELQQPGSARSTRHLEIELPKEASYQEGDHLGVIPRNYEGIVNRVTARFGLSASQQIRLEAEEEKLAHLPLAKTVSVEELLQYVELQDPVTRTQLRAMAAKTVCPPHKVELEALLEKQAYKEQVLAKRLTMLELLEKYPACEMKFSEFIALLPSIRPRYYSISSSPRVDEKQASITVSVVSGPAWSGYGEYKGIASNYLAELQEGDTITCFISTDQSEFTLPKDPETPLIMVGPGTGVAPFRGFVQARKQLKEQGQSLGEAHLYFGCRSPHEDYLYQEELENAQSEGIITLHTAFSRMPNQPKTYVQHVMEQDGKKLIELLDQGAHFYICGDGSQMAPAVEATLMKSYADVHQVSEADARLWLQQLEEKGRYAKDVWAG

SEQ ID NO: 413 - DNA, 3147 bp, synthetic construct
  misc_feature 1..3147: note = Variant of cytochrome P450
  source 1..3147: mol_type = other DNA
atgacaattaaggaaatgcctcagcctaagacgtttggagaacttaaaaatttaccgttattaaacacagataaaccggttcaagctttgatgcgtattgcggatgaattaggagaaatctttaaattcgaggcgcctggtagcgtaacgcgctttttatcaagtcagcgtctaattaaagaagcatgcgatgaaagtcgctttgataaaaacttaagtcaatcgctgaaatttggccgtgattttctgggagacgggttattcacaagctggacgcatgaaccgaattggaaaaaagcgcataatatcttaggcccaagctttagtcagcgtgcaatgaaacgttatcatgcgatgatggtcgatatcgccgtgcagcttgttcaaaagtgggagcgtctaaatgcagatgagcatattgaagtatcggaagacatgacacgtttaacgctggatacaattggtctttgcggcttcaactatcgctttaacagcttttaccgagatcagcctcatccatttattgtgagtgttgtgcgtctgctggatgaactgatgaacaagctgcagcgagcaaatccagacgacccagcttatgatgaaaacaagcgccagtgtcaagaagatattaaggtgatgaacgactatgtcgataaaattattgcagatcgcaaagcaaggggtgaacaaagccatgatttattaacgcagatgctaaacggaaaagatccagaaacgggtgagccgcttgatgacgggaacattcgttatcaaattattacattcttaatcgcgggacacgaaacaacaagtggtcttttatcatttgcgctgtatttcttagtgaaaaatccacatgtattacaaaaagtagcagaagaagcagcacgagttctagtagatcctgttccaagctacaaacaagtcaaacagcttaaatatgtcggcatggtcttaaacgaagcgctgcgcttatggccaactggtcctgcgttttccctatatgcaaaagaagatacggtgcttggaggagaatatcctttaaccaaaggcgacgaagtaatggttctgattcctcagcttcaccgtgataaaacaatttggggagacgatgtggaggagttccgtccagagcgttttgaaaatccaagtgcgattccgcagcatgcgtttaaaccgtttggaaacggtcagcgtgcgtgtatcggtcagcagttcgctcttcatgaagcaacgctggtacttggtatgatgctaaaacactttgactttgaagatcatacaaactacgagctcgttattggcgaacgcttaacgttaaaacctgaaggctttgtggtaaaagcaaaatcgaaaggcattccgcttggcggcattccttcacctagcactgaacagtctgctaaaaaagtacgcaaaaaggcagaaaacgctcataatacgccgctgcttgtgctatacggttcaaatgcgggaacagctgaaggaacggcgcgtgatttagcagatattgcaatgagcaaaggatttgcaccgcaggtcgcaacgcttgattcacacgccggaaatcttccgcgcgaaggagctgtattaattgtaacggcgtcttataacggtcatccgcctgataacgcaaagcaatttgtcgactggttagaccaagcgtctgctgatgaagtaaaaggcgttcgctactccgtatttggatgcggcgataaaaactgggctgcgacgtatcaaaaagtgcctgcttttatcgatgaaacgcttgccgctaaaggggcagaaaacatcgctgaccgcggtgaagcagatgcaagcgacgactttgaaggcacgtatgaagaatggagtgatcatatgtggagtgacgtagcagcctactttaacctcgacattgaaaacagtgaagataataaatctactctttcacttcaatttgtcgacagcgccgcggatatgccgcttgcgaaaatgcacggtgcgttttcaacgaacgtcgtagcaagcaaagaacttcaacagccaggcagtgcacgaagcacgcgacatcttgaaattgaacttccaaaagaagcttcttatcaagaaggagatcatttaggtgttattcctcgcaactatgaaggaatagtaaaccgtgtaacagcaaggttcggcctaagcgcatcacagcaaatccgtctggaagcagaagaagaaaaattagctcatttgccactcgctaaaacagtatccgtagaagagcttctgcaatacgtggagcttcaagatcctgttacgcgcacgcagcttcgcgcaatggctgctaaaacggtctgcccgccgcataaagtagagcttgaagccttgcttgaaaagcaagcctacaaagaacaagtgctggcaaaacgtttaacaatgcttgaactgcttgaaaaatacccggcgtgtgaaatgaaattcagcgaatttatcgcccttctgccaagcatacgcccgcgctattactcgatttcttcatcacctcgtgtcgatgaaaaacaagcaagcatcacggtcagcgttgtctcaggaccggcgtggagcggatatggagaatataaaggaattgcgtcgaactatcttgccgagctgcaagaaggagatacgattacgtgctttatttccacagatcagtcagaatttacgctgccaaaagaccctgaaacgccgcttatcatggtcggaccgggaacaggcgtcgcgccgtttagaggctttgtgcaggcgcgcaaacagctaaaagaacaaggacagtcacttggagaagcacatttatacttcggctgccgttcacctcatgaagactatctgtatcaagaagagcttgaaaacgcccaaagcgaaggcatcattacgcttcataccgctttttctcgcatgccaaatcagccgaaaacatacgttcagcacgtaatggaacaagacggcaagaaattgattgaacttcttgatcaaggagcgcacttctatatttgcggagacggaagccaaatggcacctgccgttgaagcaacgcttatgaaaagctatgctgacgttcaccaagtgagtgaagcagacgctcgcttatggctgcagcagctagaagaaaaaggccgatacgcaaaagacgtgtgggctggg

SEQ ID NO: 414 - protein, 1049 aa, synthetic construct
  REGION 1..1049: note = Variant of cytochrome P450
MTIKEMPQPKTFGELKNLPLLNTDKPVQALMRIADELGEIFKFEAPGSVTRFLSSQRLIKEACDESRFDKNLSQSLKFGRDFLGDGLFTSWTHEPNWKKAHNILGPSFSQRAMKRYHAMMVDIAVQLVQKWERLNADEHIEVSEDMTRLTLDTIGLCGFNYRFNSFYRDQPHPFIVSVVRLLDELMNKLQRANPDDPAYDENKRQCQEDIKVMNDYVDKIIADRKARGEQSHDLLTQMLNGKDPETGEPLDDGNIRYQIITFLIAGHETTSGLLSFALYFLVKNPHVLQKVAEEAARVLVDPVPSYKQVKQLKYVGMVLNEALRLWPTGPAFSLYAKEDTVLGGEYPLTKGDEVMVLIPQLHRDKTIWGDDVEEFRPERFENPSAIPQHAFKPFGNGQRACIGQQFALHEATLVLGMMLKHFDFEDHTNYELVIGERLTLKPEGFVVKAKSKGIPLGGIPSPSTEQSAKKVRKKAENAHNTPLLVLYGSNAGTAEGTARDLADIAMSKGFAPQVATLDSHAGNLPREGAVLIVTASYNGHPPDNAKQFVDWLDQASADEVKGVRYSVFGCGDKNWAATYQKVPAFIDETLAAKGAENIADRGEADASDDFEGTYEEWSDHMWSDVAAYFNLDIENSEDNKSTLSLQFVDSAADMPLAKMHGAFSTNVVASKELQQPGSARSTRHLEIELPKEASYQEGDHLGVIPRNYEGIVNRVTARFGLSASQQIRLEAEEEKLAHLPLAKTVSVEELLQYVELQDPVTRTQLRAMAAKTVCPPHKVELEALLEKQAYKEQVLAKRLTMLELLEKYPACEMKFSEFIALLPSIRPRYYSISSSPRVDEKQASITVSVVSGPAWSGYGEYKGIASNYLAELQEGDTITCFISTDQSEFTLPKDPETPLIMVGPGTGVAPFRGFVQARKQLKEQGQSLGEAHLYFGCRSPHEDYLYQEELENAQSEGIITLHTAFSRMPNQPKTYVQHVMEQDGKKLIELLDQGAHFYICGDGSQMAPAVEATLMKSYADVHQVSEADARLWLQQLEEKGRYAKDVWAG

SEQ ID NO: 415 - DNA, 3147 bp, synthetic construct
  misc_feature 1..3147: note = Variant of cytochrome P450
  source 1..3147: mol_type = other DNA
atgacaattaaggaaatgcctcagcctaagacgtttggagaacttaaaaatttaccgttattaaacacagataaaccggttcaagctttgatgcgtattgcggatgaattaggagaaatctttaaattcgaggcgcctggtagcgtaacgcgctttttatcaagtcagcgtctaattaaagaagcatgcgatgaaagtcgctttgataaaaacttaagtcaatcgctgaaatttgcccgtgattttctgggagacgggttatttacaagctggacgcatgaaccgaattggaaaaaagcgcataatatcttaggcccaagctttagtcagcgtgcaatgaaacgttatcatgcgatgatggtcgatatcgccgtgcagcttgttcaaaagtgggagcgtctaaatgcagatgagcatattgaagtatcggaagacatgacacgtttaacgctggatacaattggtctttgcggcttcaactatcgctttaacagcttttaccgagatcagcctcatccatttattgtgagtgttgtgcgtctgctggatgaactgatgaacaagctgcagcgagcaaatccagacgacccagcttatgatgaaaacaagcgccagtgtcaagaagctgccaaggtgatgaacgactatgtcgataaaattattgcagatcgcaaagcaaggggtgaacaaagccatgatttattaacgcagatgctaaacggaaaagatccagaaacgggtgagccgcttgatgacgggaacattcgttatcaaattattacattcttaatcgcgggacacgaaacaacaagtggtcttttatcatttgcgctgtatttcttagtgaaaaatccacatgtattacaaaaagtagcagaagaagcagcacgagttctagtagatcctgttccaagctacaaacaagtcaaacagcttaaatatgtcggcatggtcttaaacgaagcgctgcgcttatggccaactggtcctgcgttttccctatatgcaaaagaagatacggtgcttggaggagaatatcctttaaccaaaggcgacgaagtaatggttctgattcctcagcttcaccgtgataaaacaatttggggagacgatgtggaggagttccgtccagagcgttttgaaaatccaagtgcgattccgcagcatgcgtttaaaccgtttggaaacggtcagcgtgcgtgtatcggtcagcagttcgctcttcatgaagcaacgctggtacttggtatgatgctaaaacactttgactttgaagatcatacaaactacgagctcgttattaaggaacgcttaacgttaaaacctgaaggctttgtggtaaaagcaaaatcgaaaggcattccgcttggcctgattccttcacctagcactgaacagtctgctaaaaaagtacgcaaaaaggcagaaaacgctcataatacgccgctgcttgtgctatacggttcaaatgcgggaacagctgaaggaacggcgcgtgatttagcagatattgcaatgagcaaaggatttgcaccgcaggtcgcaacgcttgattcacacgccggaaatcttccgcgcgaaggagctgtattaattgtaacggcgtcttataacggtcatccgcctgataacgcaaagcaatttgtcgactggttagaccaagcgtctgctgatgaagtaaaaggcgttcgctactccgtatttggatgcggcgataaaaactgggctgcgacgtatcaaaaagtgcctgcttttatcgatgaaacgcttgccgctaaaggggcagaaaacatcgctgaccgcggtgaagcagatgcaagcgacgactttgaaggcgcgtatgaagaatggagtgatcatatgtggagtgacgtagcagcctactttaacctcgacattgaaaacagtgaagataataaatctactctttcacttcaatttgtcgacagcgccgcggatatgccgcttgcgaaaatgcacggtgcgttttcaacgaacgtcgtagcaagcaaagaacttcaacagccaggcagtgcacgaagcacgcgacatcttgaaattgaacttccaaaagaagcttcttatcaagaaggagatcatttaggtgttattcctcgcaactatgaaggaatagtaaaccgtgtaacagcaaggttcggcctaagcgcatcacagcaaatccgtctggaagcagaagaagaaaaattagctcatttgccactcgctaaaacagtatccgtagaagagcttctgcaatacgtggagcttcaagatcctgttacgcgcacgcagcttcgcgcaatggctgctaaaacggtctgcccgccgcataaagtagagcttgaagccttgcttgaaaagcaagcctacaaagaacaagtgctggcaaaacgtttaacaatgcttgaactgcttgaaaaatacccggcgtgtgaaatgaaattcagcgaatttatcgcccttctgccaagcatacgcccgcgctattactcgatttcttcatcacctcgtgtcgatgaaaaacaagcaagcatcacggtcagcgttgtctcaggaccggcgtggagcggatatggagaatataaaggaattgcgtcgaactatcttgccgagctgcaagaaggagatacgattacgtgctttatttccacagatcagtcagaatttacgctgccaaaagaccctgaaacgccgcttatcatggtcggaccgggaacaggcgtcgcgccgtttagaggctttgtgcaggcgcgcaaacagctaaaagaacaaggacagtcacttggagaagcacatttatacttcggctgccgttcacctcatgaagactatctgtatcaagaagagcttgaaaacgcccaaagcgaaggcatcattacgcttcataccgctttttctcgcatgccaaatcagccgaaaacatacgttcagcacgtaatggaacaagacggcaagaaattgattgaacttcttgatcaaggagcgcacttctatatttgcggagacggaagccaaatggcacctgccgttgaagcaacgcttatgaaaagctatgctgacgttcaccaagtgagtgaagcagacgctcgcttatggctgcagcagctagaagaaaaaggccgatacgcaaaagacgtgtgggctggg

SEQ ID NO: 416 - protein, 1049 aa, synthetic construct
  REGION 1..1049: note = Variant of cytochrome P450
MTIKEMPQPKTFGELKNLPLLNTDKPVQALMRIADELGEIFKFEAPGSVTRFLSSQRLIKEACDESRFDKNLSQSLKFARDFLGDGLFTSWTHEPNWKKAHNILGPSFSQRAMKRYHAMMVDIAVQLVQKWERLNADEHIEVSEDMTRLTLDTIGLCGFNYRFNSFYRDQPHPFIVSVVRLLDELMNKLQRANPDDPAYDENKRQCQEAAKVMNDYVDKIIADRKARGEQSHDLLTQMLNGKDPETGEPLDDGNIRYQIITFLIAGHETTSGLLSFALYFLVKNPHVLQKVAEEAARVLVDPVPSYKQVKQLKYVGMVLNEALRLWPTGPAFSLYAKEDTVLGGEYPLTKGDEVMVLIPQLHRDKTIWGDDVEEFRPERFENPSAIPQHAFKPFGNGQRACIGQQFALHEATLVLGMMLKHFDFEDHTNYELVIKERLTLKPEGFVVKAKSKGIPLGLIPSPSTEQSAKKVRKKAENAHNTPLLVLYGSNAGTAEGTARDLADIAMSKGFAPQVATLDSHAGNLPREGAVLIVTASYNGHPPDNAKQFVDWLDQASADEVKGVRYSVFGCGDKNWAATYQKVPAFIDETLAAKGAENIADRGEADASDDFEGAYEEWSDHMWSDVAAYFNLDIENSEDNKSTLSLQFVDSAADMPLAKMHGAFSTNVVASKELQQPGSARSTRHLEIELPKEASYQEGDHLGVIPRNYEGIVNRVTARFGLSASQQIRLEAEEEKLAHLPLAKTVSVEELLQYVELQDPVTRTQLRAMAAKTVCPPHKVELEALLEKQAYKEQVLAKRLTMLELLEKYPACEMKFSEFIALLPSIRPRYYSISSSPRVDEKQASITVSVVSGPAWSGYGEYKGIASNYLAELQEGDTITCFISTDQSEFTLPKDPETPLIMVGPGTGVAPFRGFVQARKQLKEQGQSLGEAHLYFGCRSPHEDYLYQEELENAQSEGIITLHTAFSRMPNQPKTYVQHVMEQDGKKLIELLDQGAHFYICGDGSQMAPAVEATLMKSYADVHQVSEADARLWLQQLEEKGRYAKDVWAG

SEQ ID NO: 417 - DNA, 3147 bp, synthetic construct
  misc_feature 1..3147: note = Variant of cytochrome P450
  source 1..3147: mol_type = other DNA
atgacaattaaggaaatgcctcagcctaagacgtttggagaacttaaaaatttaccgttattaaacacagataaaccggttcaagctttgatgcgtattgcggatgaattaggagaaatctttaaattcgaggcgcctggtagcgtaacgcgctttttatcaagtcagcgtctaattaaagaagcatgcgatgaaagtcgctttgataaaaacttaagtcaatcgctgaaatttgggcgtgattttctgggagacgggttatttacaagctggacgcatgaaccgaattggaaaaaagcgcataatatcttaggcccaagctttagtcagcgtgcaatgaaacgttatcatgcgatgatggtcgatatcgccgtgcagcttgttcaaaagtgggagcgtctaaatgcagatgagcatattgaagtatcggaagacatgacacgtttaacgctggatacaattggtctttgcggcttcaactatcgctttaacagcttttaccgagatcagcctcatccatttattgtgagtgttgtgcgtgcactggatgaagtaatgaacaagctgcagcgagcaaatccagacgacccagcttatgatgaaaacaagcgccagtgtcaagaagatatcaaggtgatgaacgactatgtcgataaaattattgcagatcgcaaagcaaggggtgaacaaagccatgatttattaacgcagatgctaaacggaaaagatccagaaacgggtgagccgcttgatgacgggaacattcgttatcaaattattacattcttaatcgcgggacacgaaacaacaagtggtcttttatcatttgcgctgtatttcttagtgaaaaatccacatgtattacaaaaagtagcagaagaagcagcacgagttctagtagatcctgttccaagctacaaacaagtcaaacagcttaaatatgtcggcatggtcttaaacgaagcgctgcgcttatggccaactggtcctgcgttttccctatatgcaaaagaagatacggtgcttggaggagaatatcctttaaccaaaggcgacgaagtaatggttctgattcctcagcttcaccgtgataaaacaatttggggagacgatgtggaggagttccgtccagagcgttttgaaaatccaagtgcgattccgcagcatgcgtttaaaccgtttggaaacggtcagcgtgcgtgtatcggtcagcagttcgctcttcatgaagcaacgctggtacttggtatgatgctaaaacactttgactttgaagatcatacaaactacgagctcgttattggcgaacgcttaacgttaaaacctgaaggctttgtggtaaaagcaaaatcgaaaggcattccgcttggcggtattccttcacctagcactgaacagtctgctaaaaaagtacgcaaaaaggcagaaaacgctcataatacgccgctgcttgtgctatacggttcaaatgcgggaacagctgaaggaacggcgcgtgatttagcagatattgcaatgagcaaaggatttgcaccgcaggtcgcaacgcttgattcacacgccggaaatcttccgcgcgaaggagctgtattaattgtaacggcgtcttataacggtcatccgcctgataacgcaaagcaatttgtcgactggttagaccaagcgtctgctgatgaagtaaaaggcgttcgctactccgtatttggatgcggcgataaaaactgggctgcgacgtatcaaaaagtgcctgcttttatcgatgaaacgcttgccgctaaaggggcagaaaacatcgctgaccgcggtgaagcagatgcaagcgacgactttgaaggcgcgtatgaagaatggagtgatcatatgtggagtgacgtagcagcctactttaacctcgacattgaaaacagtgaagataataaatctactctttcacttcaatttgtcgacagcgccgcggatatgccgcttgcgaaaatgcacggtgcgttttcaacgaacgtcgtagcaagcaaagaacttcaacagccaggcagtgcacgaagcacgcgacatcttgaaattgaacttccaaaagaagcttcttatcaagaaggagatcatttaggtgttattcctcgcaactatgaaggaatagtaaaccgtgtaacagcaaggttcggcctaagcgcatcacagcaaatccgtctggaagcagaagaagaaaaattagctcatttgccactcgctaaaacagtatccgtagaagagcttctgcaatacgtggagcttcaagatcctgttacgcgcacgcagcttcgcgcaatggctgctaaaacggtctgcccgccgcataaagtagagcttgaagccttgcttgaaaagcaagcctacaaagaacaagtgctggcaaaacgtttaacaatgcttgaactgcttgaaaaatacccggcgtgtgaaatgaaattcagcgaatttatcgcccttctgccaagcatacgcccgcgctattactcgatttcttcatcacctcgtgtcgatgaaaaacaagcaagcatcacggtcagcgttgtctcaggaccggcgtggagcggatatggagaatataaaggaattgcgtcgaactatcttgccgagctgcaagaaggagatacgattacgtgctttatttccacagatcagtcagaatttacgctgccaaaagaccctgaaacgccgcttatcatggtcggaccgggaacaggcgtcgcgccgtttagaggctttgtgcaggcgcgcaaacagctaaaagaacaaggacagtcacttggagaagcacatttatacttcggctgccgttcacctcatgaagactatctgtatcaagaagagcttgaaaacgcccaaagcgaaggcatcattacgcttcataccgctttttctcgcatgccaaatcagccgaaaacatacgttcagcacgtaatggaacaagacggcaagaaattgattgaacttcttgatcaaggagcgcacttctatatttgcggagacggaagccaaatggcacctgccgttgaagcaacgcttatgaaaagctatgctgacgttcaccaagtgagtgaagcagacgctcgcttatggctgcagcagctagaagaaaaaggccgatacgcaaaagacgtgtgggctggg

SEQ ID NO: 418 - protein, 1049 aa, synthetic construct
  REGION 1..1049: note = Variant of cytochrome P450
MTIKEMPQPKTFGELKNLPLLNTDKPVQALMRIADELGEIFKFEAPGSVTRFLSSQRLIKEACDESRFDKNLSQSLKFGRDFLGDGLFTSWTHEPNWKKAHNILGPSFSQRAMKRYHAMMVDIAVQLVQKWERLNADEHIEVSEDMTRLTLDTIGLCGFNYRFNSFYRDQPHPFIVSVVRALDEVMNKLQRANPDDPAYDENKRQCQEDIKVMNDYVDKIIADRKARGEQSHDLLTQMLNGKDPETGEPLDDGNIRYQIITFLIAGHETTSGLLSFALYFLVKNPHVLQKVAEEAARVLVDPVPSYKQVKQLKYVGMVLNEALRLWPTGPAFSLYAKEDTVLGGEYPLTKGDEVMVLIPQLHRDKTIWGDDVEEFRPERFENPSAIPQHAFKPFGNGQRACIGQQFALHEATLVLGMMLKHFDFEDHTNYELVIGERLTLKPEGFVVKAKSKGIPLGGIPSPSTEQSAKKVRKKAENAHNTPLLVLYGSNAGTAEGTARDLADIAMSKGFAPQVATLDSHAGNLPREGAVLIVTASYNGHPPDNAKQFVDWLDQASADEVKGVRYSVFGCGDKNWAATYQKVPAFIDETLAAKGAENIADRGEADASDDFEGAYEEWSDHMWSDVAAYFNLDIENSEDNKSTLSLQFVDSAADMPLAKMHGAFSTNVVASKELQQPGSARSTRHLEIELPKEASYQEGDHLGVIPRNYEGIVNRVTARFGLSASQQIRLEAEEEKLAHLPLAKTVSVEELLQYVELQDPVTRTQLRAMAAKTVCPPHKVELEALLEKQAYKEQVLAKRLTMLELLEKYPACEMKFSEFIALLPSIRPRYYSISSSPRVDEKQASITVSVVSGPAWSGYGEYKGIASNYLAELQEGDTITCFISTDQSEFTLPKDPETPLIMVGPGTGVAPFRGFVQARKQLKEQGQSLGEAHLYFGCRSPHEDYLYQEELENAQSEGIITLHTAFSRMPNQPKTYVQHVMEQDGKKLIELLDQGAHFYICGDGSQMAPAVEATLMKSYADVHQVSEADARLWLQQLEEKGRYAKDVWAG

SEQ ID NO: 419 - DNA, 3147 bp, synthetic construct
  misc_feature 1..3147: note = Variant of cytochrome P450
  source 1..3147: mol_type = other DNA
atgacaattaaggaaatgcctcagcctaagacgtttggagaacttaaaaatttaccgttattaaacacagataaaccggttcaagctttgatgcgtattgcggatgaattaggagaaatctttaaattcgaggcgcctggtagcgtaacgcgctttttatcaagtcagcgtctaattaaagaagcatgcgatgaacgtcgctttgataaaaacttaagtcaatcgctgaaatttgcccgtgcttttctgggagacgggttatttacaagctggacgcatgaaccgaattggaaaaaagcgcataatatcttaggcccaagctttagtcagcgtgcaatgaaacgttatcatgcgatgatggtcgatatcgccgtgcagcttgttcaaaagtgggagcgtctaaatgcagatgagcatattgaagtatcggaagacatgacacgtttaacgctggatacaattggtctttgcggcttcaactatcgctttaacagcttttaccgagatcagcctcatccatttattgtgagtgttgtgcgtgcactggatgaagtcatgaacaagctgcagcgagcaaatccagacgacccagcttatgatgaaaacaagcgccagtgtcaagaagatatcaaggtgatgaacgactatgtcgataaaattattgcagatcgcaaagcaaggggtgaacaaagccatgatttattaacgcagatgctaaacggaaaagatccagaaacgggtgagccgcttgatgacgggaacattcgttatcaaattattacattcttaatcgcgggacacgaaacaacaagtggtcttttatcatttgcgctgtatttcttagtgaaaaatccacatgtattacaaaaagtagcagaagaagcagcacgagttctagtagatcctgttccaagctacaaacaagtcaaacagcttaaatatgtcggcatggtcttaaacgaagcgctgcgcttatggccaactggtcctgcgttttccctatatgcaaaagaagatacggtgcttggaggagaatatcctttaaccaaaggcgacgaagtaatggttctgattcctcagcttcaccgtgataaaacaatttggggagacgatgtggaggagttccgtccagagcgttttgaaaatccaagtgcgattccgcagcatgcgtttaaaccgtttggaaacggtcagcgtgcgtgtatcggtcagcagttcgctcttcatgaagcaacgctggtacttggtatgatgctaaaacactttgactttgaagatcatacaaactacgagctcgttattaaggaacgcttaacgttaaaacctgaaggctttgtggtaaaagcaaaatcgaaaggcattccgcttggcggcattccttcacctagcactgaacagtctgctaaaaaagtacgcaaaaaggcagaaaacgctcataatacgccgctgcttgtgctatacggttcaaatgcgggaacagctgaaggaacggcgcgtgatttagcagatattgcaatgagcaaaggatttgcaccgcaggtcgcaacgcttgattcacacgccggaaatcttccgcgcgaaggagctgtattaattgtaacggcgtcttataacggtcatccgcctgataacgcaaagcaatttgtcgactggttagaccaagcgtctgctgatgaagtaaaaggcgttcgctactccgtatttggatgcggcgataaaaactgggctgcgacgtatcaaaaagtgcctgcttttatcgatgaaacgcttgccgctaaaggggcagaaaacatcgctgaccgcggtgaagcagatgcaagcgacgactttgaaggcgcgtatgaagaatggagtgatcatatgtggagtgacgtagcagcctactttaacctcgacattgaaaacagtgaagataataaatctactctttcacttcaatttgtcgacagcgccgcggatatgccgcttgcgaaaatgcacggtgcgttttcaacgaacgtcgtagcaagcaaagaacttcaacagccaggcagtgcacgaagcacgcgacatcttgaaattgaacttccaaaagaagcttcttatcaagaaggagatcatttaggtgttattcctcgcaactatgaaggaatagtaaaccgtgtaacagcaaggttcggcctaagcgcatcacagcaaatccgtctggaagcagaagaagaaaaattagctcatttgccactcgctaaaacagtatccgtagaagagcttctgcaatacgtggagcttcaagatcctgttacgcgcacgcagcttcgcgcaatggctgctaaaacggtctgcccgccgcataaagtagagcttgaagccttgcttgaaaagcaagcctacaaagaacaagtgctggcaaaacgtttaacaatgcttgaactgcttgaaaaatacccggcgtgtgaaatgaaattcagcgaatttatcgcccttctgccaagcatacgcccgcgctattactcgatttcttcatcacctcgtgtcgatgaaaaacaagcaagcatcacggtcagcgttgtctcaggaccggcgtggagcggatatggagaatataaaggaattgcgtcgaactatcttgccgagctgcaagaaggagatacgattacgtgctttatttccacagatcagtcagaatttacgctgccaaaagaccctgaaacgccgcttatcatggtcggaccgggaacaggcgtcgcgccgtttagaggctttgtgcaggcgcgcaaacagctaaaagaacaaggacagtcacttggagaagcacatttatacttcggctgccgttcacctcatgaagactatctgtatcaagaagagcttgaaaacgcccaaagcgaaggcatcattacgcttcataccgctttttctcgcatgccaaatcagccgaaaacatacgttcagcacgtaatggaacaagacggcaagaaattgattgaacttcttgatcaaggagcgcacttctatatttgcggagacggaagccaaatggcacctgccgttgaagcaacgcttatgaaaagctatgctgacgttcaccaagtgagtgaagcagacgctcgcttatggctgcagcagctagaagaaaaaggccgatacgcaaaagacgtgtgggctggg

SEQ ID NO: 420 - protein, 1049 aa, synthetic construct
  REGION 1..1049: note = Variant of cytochrome P450
MTIKEMPQPKTFGELKNLPLLNTDKPVQALMRIADELGEIFKFEAPGSVTRFLSSQRLIKEACDERRFDKNLSQSLKFARAFLGDGLFTSWTHEPNWKKAHNILGPSFSQRAMKRYHAMMVDIAVQLVQKWERLNADEHIEVSEDMTRLTLDTIGLCGFNYRFNSFYRDQPHPFIVSVVRALDEVMNKLQRANPDDPAYDENKRQCQEDIKVMNDYVDKIIADRKARGEQSHDLLTQMLNGKDPETGEPLDDGNIRYQIITFLIAGHETTSGLLSFALYFLVKNPHVLQKVAEEAARVLVDPVPSYKQVKQLKYVGMVLNEALRLWPTGPAFSLYAKEDTVLGGEYPLTKGDEVMVLIPQLHRDKTIWGDDVEEFRPERFENPSAIPQHAFKPFGNGQRACIGQQFALHEATLVLGMMLKHFDFEDHTNYELVIKERLTLKPEGFVVKAKSKGIPLGGIPSPSTEQSAKKVRKKAENAHNTPLLVLYGSNAGTAEGTARDLADIAMSKGFAPQVATLDSHAGNLPREGAVLIVTASYNGHPPDNAKQFVDWLDQASADEVKGVRYSVFGCGDKNWAATYQKVPAFIDETLAAKGAENIADRGEADASDDFEGAYEEWSDHMWSDVAAYFNLDIENSEDNKSTLSLQFVDSAADMPLAKMHGAFSTNVVASKELQQPGSARSTRHLEIELPKEASYQEGDHLGVIPRNYEGIVNRVTARFGLSASQQIRLEAEEEKLAHLPLAKTVSVEELLQYVELQDPVTRTQLRAMAAKTVCPPHKVELEALLEKQAYKEQVLAKRLTMLELLEKYPACEMKFSEFIALLPSIRPRYYSISSSPRVDEKQASITVSVVSGPAWSGYGEYKGIASNYLAELQEGDTITCFISTDQSEFTLPKDPETPLIMVGPGTGVAPFRGFVQARKQLKEQGQSLGEAHLYFGCRSPHEDYLYQEELENAQSEGIITLHTAFSRMPNQPKTYVQHVMEQDGKKLIELLDQGAHFYICGDGSQMAPAVEATLMKSYADVHQVSEADARLWLQQLEEKGRYAKDVWAG

SEQ ID NO: 421 - DNA, 3147 bp, synthetic construct
  misc_feature 1..3147: note = Variant of cytochrome P450
  source 1..3147: mol_type = other DNA
atgacaattaaggaaatgcctcagcctaagacgtttggagaacttaaaaatttaccgttattaaacacagataaaccggttcaagctttgatgcgtattgcggatgaattaggagaaatctttaaattcgaggcgcctggtagcgtaacgcgctttttatcaagtcagcgtctaattaaagaagcatgcgatgaaagtcgctttgataaaaacttaagtcaatcgctgaaatttgcccgtgattttctgggagacgggttatttacaagctggacgcatgaaccgaattggaaaaaagcgcataatatcttaggcccaagctttagtcagcgtgcaatgaaacgttatcatgcgatgatggtcgatatcgccgtgcagcttgttcaaaagtgggagcgtctaaatgcagatgagcatattgaagtatcggaagacatgacacgtttaacgctggatacaattggtctttgcggcttcaactatcgctttaacagcttttaccgagatcagcctcatccatttattgtgagtgttgtgcgtctgctggatgaactgatgaacaagctgcagcgagcaaatccagacgacccagcttatgatgaaaacaagcgccagtgtcaagaagatgccaaggtgatgaacgactatgtcgataaaattattgcagatcgcaaagcaaggggtgaacaaagccatgatttattaacgcagatgctaaacggaaaagatccagaaacgggtgagccgcttgatgacgggaacattcgttatcaaattattacattcttaatcgcgggacacgaaacaacaagtggtcttttatcatttgcgctgtatttcttagtgaaaaatccacatgtattacaaaaagtagcagaagaagcagcacgagttctagtagatcctgttccaagctacaaacaagtcaaacagcttaaatatgtcggcatggtcttaaacgaagcgctgcgcttatggccaactggtcctgcgttttccctatatgcaaaagaagatacggtgcttggaggagaatatcctttaaccaaaggcgacgaagtaatggttctgattcctcagcttcaccgtgataaaacaatttggggagacgatgtggaggagttccgtccagagcgttttgaaaatccaagtgcgattccgcagcatgcgtttaaaccgtttggaaacggtcagcgtgcgtgtatcggtcagcagttcgctcttcatgaagcaacgctggtacttggtatgatgctaaaacactttgactttgaagatcatacaaactacgagctcgttattggcgaacgcttaacgttaaaacctgaaggctttgtggtaaaagcaaaatcgaaaggcattccgcttggcctgattccttcacctagcactgaacagtctgctaaaaaagtacgcaaaaaggcagaaaacgctcataatacgccgctgcttgtgctatacggttcaaatgcgggaacagctgaaggaacggcgcgtgatttagcagatattgcaatgagcaaaggatttgcaccgcaggtcgcaacgcttgattcacacgccggaaatcttccgcgcgaaggagctgtattaattgtaacggcgtcttataacggtcatccgcctgataacgcaaagcaatttgtcgactggttagaccaagcgtctgctgatgaagtaaaaggcgttcgctactccgtatttggatgcggcgataaaaactgggctgcgacgtatcaaaaagtgcctgcttttatcgatgaaacgcttgccgctaaaggggcagaaaacatcgctgaccgcggtgaagcagatgcaagcgacgactttgaaggcacgtatgaagaatggagtgatcatatgtggagtgacgtagcagcctactttaacctcgacattgaaaacagtgaagataataaatctactctttcacttcaatttgtcgacagcgccgcggatatgccgcttgcgaaaatgcacggtgcgttttcaacgaacgtcgtagcaagcaaagaacttcaacagccaggcagtgcacgaagcacgcgacatcttgaaattgaacttccaaaagaagcttcttatcaagaaggagatcatttaggtgttattcctcgcaactatgaaggaatagtaaaccgtgtaacagcaaggttcggcctaagcgcatcacagcaaatccgtctggaagcagaagaagaaaaattagctcatttgccactcgctaaaacagtatccgtagaagagcttctgcaatacgtggagcttcaagatcctgttacgcgcacgcagcttcgcgcaatggctgctaaaacggtctgcccgccgcataaagtagagcttgaagccttgcttgaaaagcaagcctacaaagaacaagtgctggcaaaacgtttaacaatgcttgaactgcttgaaaaatacccggcgtgtgaaatgaaattcagcgaatttatcgcccttctgccaagcatacgcccgcgctattactcgatttcttcatcacctcgtgtcgatgaaaaacaagcaagcatcacggtcagcgttgtctcaggaccggcgtggagcggatatggagaatataaaggaattgcgtcgaactatcttgccgagctgcaagaaggagatacgattacgtgctttatttccacagatcagtcagaatttacgctgccaaaagaccctgaaacgccgcttatcatggtcggaccgggaacaggcgtcgcgccgtttagaggctttgtgcaggcgcgcaaacagctaaaagaacaaggacagtcacttggagaagcacatttatacttcggctgccgttcacctcatgaagactatctgtatcaagaagagcttgaaaacgcccaaagcgaaggcatcattacgcttcataccgctttttctcgcatgccaaatcagccgaaaacatacgttcagcacgtaatggaacaagacggcaagaaattgattgaacttcttgatcaaggagcgcacttctatatttgcggagacggaagccaaatggcacctgccgttgaagcaacgcttatgaaaagctatgctgacgttcaccaagtgagtgaagcagacgctcgcttatggctgcagcagctagaagaaaaaggccgatacgcaaaagacgtgtgggctggg

SEQ ID NO: 422 - protein, 1049 aa, synthetic construct
  REGION 1..1049: note = Variant of cytochrome P450
MTIKEMPQPKTFGELKNLPLLNTDKPVQALMRIADELGEIFKFEAPGSVTRFLSSQRLIKEACDESRFDKNLSQSLKFARDFLGDGLFTSWTHEPNWKKAHNILGPSFSQRAMKRYHAMMVDIAVQLVQKWERLNADEHIEVSEDMTRLTLDTIGLCGFNYRFNSFYRDQPHPFIVSVVRLLDELMNKLQRANPDDPAYDENKRQCQEDAKVMNDYVDKIIADRKARGEQSHDLLTQMLNGKDPETGEPLDDGNIRYQIITFLIAGHETTSGLLSFALYFLVKNPHVLQKVAEEAARVLVDPVPSYKQVKQLKYVGMVLNEALRLWPTGPAFSLYAKEDTVLGGEYPLTKGDEVMVLIPQLHRDKTIWGDDVEEFRPERFENPSAIPQHAFKPFGNGQRACIGQQFALHEATLVLGMMLKHFDFEDHTNYELVIGERLTLKPEGFVVKAKSKGIPLGLIPSPSTEQSAKKVRKKAENAHNTPLLVLYGSNAGTAEGTARDLADIAMSKGFAPQVATLDSHAGNLPREGAVLIVTASYNGHPPDNAKQFVDWLDQASADEVKGVRYSVFGCGDKNWAATYQKVPAFIDETLAAKGAENIADRGEADASDDFEGTYEEWSDHMWSDVAAYFNLDIENSEDNKSTLSLQFVDSAADMPLAKMHGAFSTNVVASKELQQPGSARSTRHLEIELPKEASYQEGDHLGVIPRNYEGIVNRVTARFGLSASQQIRLEAEEEKLAHLPLAKTVSVEELLQYVELQDPVTRTQLRAMAAKTVCPPHKVELEALLEKQAYKEQVLAKRLTMLELLEKYPACEMKFSEFIALLPSIRPRYYSISSSPRVDEKQASITVSVVSGPAWSGYGEYKGIASNYLAELQEGDTITCFISTDQSEFTLPKDPETPLIMVGPGTGVAPFRGFVQARKQLKEQGQSLGEAHLYFGCRSPHEDYLYQEELENAQSEGIITLHTAFSRMPNQPKTYVQHVMEQDGKKLIELLDQGAHFYICGDGSQMAPAVEATLMKSYADVHQVSEADARLWLQQLEEKGRYAKDVWAG

SEQ ID NO: 423 - DNA, 3147 bp, synthetic construct
  misc_feature 1..3147: note = Variant of cytochrome P450
  source 1..3147: mol_type = other DNA
atgacaattaaggaaatgcctcagcctaagacgtttggagaacttaaaaatttaccgttattaaacacagataaaccggttcaagctttgatgcgtattgcggatgaattaggagaaatctttaaattcgaggcgcctggtagcgtaacgcgctttttatcaagtcagcgtctaattaaagaagcatgcgatgaatcacgctttgataaaaacttaagtcaatcgctgaaatttgcccgtgattttctgggagacgggttatttacaagctggacgcatgaaccgaattggaaaaaagcgcataatatcttaggcccaagctttagtcagcgtgcaatgaaacgttatcatgcgatgatggtcgatatcgccgtgcagcttgttcaaaagtgggagcgtctaaatgcagatgagcatattgaagtatcggaagacatgacacgtttaacgctggatacaattggtctttgcggcttcaactatcgctttaacagcttttaccgagatcagcctcatccatttattgtgagtgttgtgcgtgcactggatgaagtaatgaacaagctgcagcgagcaaatccagacgacccagcttatgatgaaaacaagcgccagtgtcaagaagatatcaaggtgatgaacgactatgtcgataaaattattgcagatcgcaaagcaaggggtgaacaaagccatgatttattaacgcagatgctaaacggaaaagatccagaaacgggtgagccgcttgatgacgggaacattcgttatcaaattattacattcttaatcgcgggacacgaaacaacaagtggtcttttatcatttgcgctgtatttcttagtgaaaaatccacatgtattacaaaaagtagcagaagaagcagcacgagttctagtagatcctgttccaagctacaaacaagtcaaacagcttaaatatgtcggcatggtcttaaacgaagcgctgcgcttatggccaactggtcctgcgttttccctatatgcaaaagaagatacggtgcttggaggagaatatcctttaaccaaaggcgacgaagtaatggttctgattcctcagcttcaccgtgataaaacaatttggggagacgatgtggaggagttccgtccagagcgttttgaaaatccaagtgcgattccgcagcatgcgtttaaaccgtttggaaacggtcagcgtgcgtgtatcggtcagcagttcgctcttcatgaagcaacgctggtacttggtatgatgctaaaacactttgactttgaagatcatacaaactacgagctcgttattggcgaaaaattaacgttaaaacctgaaggctttgtggtaaaagcaaaatcgaaaggcattccgcttggcggcattccttcacctagcactgaacagtctgctaaaaaagtacgcaaaaaggcagaaaacgctcataatacgccgctgcttgtgctatacggttcaaatgcgggaacagctgaaggaacggcgcgtgatttagcagatattgcaatgagcaaaggatttgcaccgcaggtcgcaacgcttgattcacacgccggaaatcttccgcgcgaaggagctgtattaattgtaacggcgtcttataacggtcatccgcctgataacgcaaagcaatttgtcgactggttagaccaagcgtctgctgatgaagtaaaaggcgttcgctactccgtatttggatgcggcgataaaaactgggctgcgacgtatcaaaaagtgcctgcttttatcgatgaaacgcttgccgctaaaggggcagaaaacatcgctgaccgcggtgaagcagatgcaagcgacgactttgaaggcacgtatgaagaatggagtgatcatatgtggagtgacgtagcagcctactttaacctcgacattgaaaacagtgaagataataaatctactctttcacttcaatttgtcgacagcgccgcggatatgccgcttgcgaaaatgcacggtgcgttttcaacgaacgtcgtagcaagcaaagaacttcaacagccaggcagtgcacgaagcacgcgacatcttgaaattgaacttccaaaagaagcttcttatcaagaaggagatcatttaggtgttattcctcgcaactatgaaggaatagtaaaccgtgtaacagcaaggttcggcctaagcgcatcacagcaaatccgtctggaagcagaagaagaaaaattagctcatttgccactcgctaaaacagtatccgtagaagagcttctgcaatacgtggagcttcaagatcctgttacgcgcacgcagcttcgcgcaatggctgctaaaacggtctgcccgccgcataaagtagagcttgaagccttgcttgaaaagcaagcctacaaagaacaagtgctggcaaaacgtttaacaatgcttgaactgcttgaaaaatacccggcgtgtgaaatgaaattcagcgaatttatcgcccttctgccaagcatacgcccgcgctattactcgatttcttcatcacctcgtgtcgatgaaaaacaagcaagcatcacggtcagcgttgtctcaggaccggcgtggagcggatatggagaatataaaggaattgcgtcgaactatcttgccgagctgcaagaaggagatacgattacgtgctttatttccacagatcagtcagaatttacgctgccaaaagaccctgaaacgccgcttatcatggtcggaccgggaacaggcgtcgcgccgtttagaggctttgtgcaggcgcgcaaacagctaaaagaacaaggacagtcacttggagaagcacatttatacttcggctgccgttcacctcatgaagactatctgtatcaagaagagcttgaaaacgcccaaagcgaaggcatcattacgcttcataccgctttttctcgcatgccaaatcagccgaaaacatacgttcagcacgtaatggaacaagacggcaagaaattgattgaacttcttgatcaaggagcgcacttctatatttgcggagacggaagccaaatggcacctgccgttgaagcaacgcttatgaaaagctatgctgacgttcaccaagtgagtgaagcagacgctcgcttatggctgcagcagctagaagaaaaaggccgatacgcaaaagacgtgtgggctggg

SEQ ID NO: 424 - protein, 1049 aa, synthetic construct
  REGION 1..1049: note = Variant of cytochrome P450
MTIKEMPQPKTFGELKNLPLLNTDKPVQALMRIADELGEIFKFEAPGSVTRFLSSQRLIKEACDESRFDKNLSQSLKFARDFLGDGLFTSWTHEPNWKKAHNILGPSFSQRAMKRYHAMMVDIAVQLVQKWERLNADEHIEVSEDMTRLTLDTIGLCGFNYRFNSFYRDQPHPFIVSVVRALDEVMNKLQRANPDDPAYDENKRQCQEDIKVMNDYVDKIIADRKARGEQSHDLLTQMLNGKDPETGEPLDDGNIRYQIITFLIAGHETTSGLLSFALYFLVKNPHVLQKVAEEAARVLVDPVPSYKQVKQLKYVGMVLNEALRLWPTGPAFSLYAKEDTVLGGEYPLTKGDEVMVLIPQLHRDKTIWGDDVEEFRPERFENPSAIPQHAFKPFGNGQRACIGQQFALHEATLVLGMMLKHFDFEDHTNYELVIGEKLTLKPEGFVVKAKSKGIPLGGIPSPSTEQSAKKVRKKAENAHNTPLLVLYGSNAGTAEGTARDLADIAMSKGFAPQVATLDSHAGNLPREGAVLIVTASYNGHPPDNAKQFVDWLDQASADEVKGVRYSVFGCGDKNWAATYQKVPAFIDETLAAKGAENIADRGEADASDDFEGTYEEWSDHMWSDVAAYFNLDIENSEDNKSTLSLQFVDSAADMPLAKMHGAFSTNVVASKELQQPGSARSTRHLEIELPKEASYQEGDHLGVIPRNYEGIVNRVTARFGLSASQQIRLEAEEEKLAHLPLAKTVSVEELLQYVELQDPVTRTQLRAMAAKTVCPPHKVELEALLEKQAYKEQVLAKRLTMLELLEKYPACEMKFSEFIALLPSIRPRYYSISSSPRVDEKQASITVSVVSGPAWSGYGEYKGIASNYLAELQEGDTITCFISTDQSEFTLPKDPETPLIMVGPGTGVAPFRGFVQARKQLKEQGQSLGEAHLYFGCRSPHEDYLYQEELENAQSEGIITLHTAFSRMPNQPKTYVQHVMEQDGKKLIELLDQGAHFYICGDGSQMAPAVEATLMKSYADVHQVSEADARLWLQQLEEKGRYAKDVWAG

SEQ ID NO: 425 - DNA, 3147 bp, synthetic construct
  misc_feature 1..3147: note = Variant of cytochrome P450
  source 1..3147: mol_type = other DNA
atgacaattaaggaaatgcctcagcctaagacgtttggagaacttaaaaatttaccgttattaaacacagataaaccggttcaagctttgatgcgtattgcggatgaattaggagaaatctttaaattcgaggcgcctggtagcgtaacgcgctttttatcaagtcagcgtctaattaaagaagcatgcgatgaaagtcgctttgataaaaacttaagtcaatcgctgaaatttgggcgtgattttctgggagacgggttatttacaagctggacgcatgaaccgaattggaaaaaagcgcataatatcttaggcccaagctttagtcagcgtgcaatgaaacgttatcatgcgatgatggtcgatatcgccgtgcagcttgttcaaaagtgggagcgtctaaatgcagatgagcatattgaagtatcggaagacatgacacgtttaacgctggatacaattggtctttgcggcttcaactatcgctttaacagcttttaccgagatcagcctcatccatttattgtgagtgttgtgcgtctgctggatgaactgatgaacaagctgcagcgagcaaatccagacgacccagcttatgatgaaaacaagcgccagtgtcaagaagatatcaaggtgatgaacgactatgtcgataaaattattgcagatcgcaaagcaaggggtgaacaaagccatgatttattaacgcagatgctaaacggaaaagatccagaaacgggtgagccgcttgatgacgggaacattcgttatcaaattattacattcttaatcgcgggacacgaaacaacaagtggtcttttatcatttgcgctgtatttcttagtgaaaaatccacatgtattacaaaaagtagcagaagaagcagcacgagttctagtagatcctgttccaagctacaaacaagtcaaacagcttaaatatgtcggcatggtcttaaacgaagcgctgcgcttatggccaactggtcctgcgttttccctatatgcaaaagaagatacggtgcttggaggagaatatcctttaaccaaaggcgacgaagtaatggttctgattcctcagcttcaccgtgataaaacaatttggggagacgatgtggaggagttccgtccagagcgttttgaaaatccaagtgcgattccgcagcatgcgtttaaaccgtttggaaacggtcagcgtgcgtgtatcggtcagcagttcgctcttcatgaagcaacgctggtacttggtatgatgctaaaacactttgactttgaagatcatacaaactacgagctcgttattggcgaacgcttaacgttaaaacctgaaggctttgtggtaaaagcaaaatcgaaaggcattccgcttggcggcattccttcacctagcactgaacagtctgctaaaaaagtacgcaaaaaggcagaaaacgctcataatacgccgctgcttgtgctatacggttcaaatgcgggaacagctgaaggaacggcgcgtgatttagcagatattgcaatgagcaaaggatttgcaccgcaggtcgcaacgcttgattcacacgccggaaatcttccgcgcgaaggagctgtattaattgtaacggcgtcttataacggtcatccgcctgataacgcaaagcaatttgtcgactggttagaccaagcgtctgctgatgaagtaaaaggcgttcgctactccgtatttggatgcggcgataaaaactgggctgcgacgtatcaaaaagtgcctgcttttatcgatgaaacgcttgccgctaaaggggcagaaaacatcgctgaccgcggtgaagcagatgcaagcgacgactttgaaggcgcgtatgaagaatggagtgatcatatgtggagtgacgtagcagcctactttaacctcgacattgaaaacagtgaagataataaatctactctttcacttcaatttgtcgacagcgccgcggatatgccgcttgcgaaaatgcacggtgcgttttcaacgaacgtcgtagcaagcaaagaacttcaacagccaggcagtgcacgaagcacgcgacatcttgaaattgaacttccaaaagaagcttcttatcaagaaggagatcatttaggtgttattcctcgcaactatgaaggaatagtaaaccgtgtaacagcaaggttcggcctaagcgcatcacagcaaatccgtctggaagcagaagaagaaaaattagctcatttgccactcgctaaaacagtatccgtagaagagcttctgcaatacgtggagcttcaagatcctgttacgcgcacgcagcttcgcgcaatggctgctaaaacggtctgcccgccgcataaagtagagcttgaagccttgcttgaaaagcaagcctacaaagaacaagtgctggcaaaacgtttaacaatgcttgaactgcttgaaaaatacccggcgtgtgaaatgaaattcagcgaatttatcgcccttctgccaagcatacgcccgcgctattactcgatttcttcatcacctcgtgtcgatgaaaaacaagcaagcatcacggtcagcgttgtctcaggaccggcgtggagcggatatggagaatataaaggaattgcgtcgaactatcttgccgagctgcaagaaggagatacgattacgtgctttatttccacagatcagtcagaatttacgctgccaaaagaccctgaaacgccgcttatcatggtcggaccgggaacaggcgtcgcgccgtttagaggctttgtgcaggcgcgcaaacagctaaaagaacaaggacagtcacttggagaagcacatttatacttcggctgccgttcacctcatgaagactatctgtatcaagaagagcttgaaaacgcccaaagcgaaggcatcattacgcttcataccgctttttctcgcatgccaaatcagccgaaaacatacgttcagcacgtaatggaacaagacggcaagaaattgattgaacttcttgatcaaggagcgcacttctatatttgcggagacggaagccaaatggcacctgccgttgaagcaacgcttatgaaaagctatgctgacgttcaccaagtgagtgaagcagacgctcgcttatggctgcagcagctagaagaaaaaggccgatacgcaaaagacgtgtgggctggg

SEQ ID NO: 426 - protein, 1049 aa, synthetic construct
  REGION 1..1049: note = Variant of cytochrome P450
MTIKEMPQPKTFGELKNLPLLNTDKPVQALMRIADELGEIFKFEAPGSVTRFLSSQRLIKEACDESRFDKNLSQSLKFGRDFLGDGLFTSWTHEPNWKKAHNILGPSFSQRAMKRYHAMMVDIAVQLVQKWERLNADEHIEVSEDMTRLTLDTIGLCGFNYRFNSFYRDQPHPFIVSVVRLLDELMNKLQRANPDDPAYDENKRQCQEDIKVMNDYVDKIIADRKARGEQSHDLLTQMLNGKDPETGEPLDDGNIRYQIITFLIAGHETTSGLLSFALYFLVKNPHVLQKVAEEAARVLVDPVPSYKQVKQLKYVGMVLNEALRLWPTGPAFSLYAKEDTVLGGEYPLTKGDEVMVLIPQLHRDKTIWGDDVEEFRPERFENPSAIPQHAFKPFGNGQRACIGQQFALHEATLVLGMMLKHFDFEDHTNYELVIGERLTLKPEGFVVKAKSKGIPLGGIPSPSTEQSAKKVRKKAENAHNTPLLVLYGSNAGTAEGTARDLADIAMSKGFAPQVATLDSHAGNLPREGAVLIVTASYNGHPPDNAKQFVDWLDQASADEVKGVRYSVFGCGDKNWAATYQKVPAFIDETLAAKGAENIADRGEADASDDFEGAYEEWSDHMWSDVAAYFNLDIENSEDNKSTLSLQFVDSAADMPLAKMHGAFSTNVVASKELQQPGSARSTRHLEIELPKEASYQEGDHLGVIPRNYEGIVNRVTARFGLSASQQIRLEAEEEKLAHLPLAKTVSVEELLQYVELQDPVTRTQLRAMAAKTVCPPHKVELEALLEKQAYKEQVLAKRLTMLELLEKYPACEMKFSEFIALLPSIRPRYYSISSSPRVDEKQASITVSVVSGPAWSGYGEYKGIASNYLAELQEGDTITCFISTDQSEFTLPKDPETPLIMVGPGTGVAPFRGFVQARKQLKEQGQSLGEAHLYFGCRSPHEDYLYQEELENAQSEGIITLHTAFSRMPNQPKTYVQHVMEQDGKKLIELLDQGAHFYICGDGSQMAPAVEATLMKSYADVHQVSEADARLWLQQLEEKGRYAKDVWAG

SEQ ID NO: 427 - DNA, 3147 bp, synthetic construct
  misc_feature 1..3147: note = Variant of cytochrome P450
  source 1..3147: mol_type = other DNA
atgacaattaaggaaatgcctcagcctaagacgtttggagaacttaaaaatttaccgttattaaacacagataaaccggttcaagctttgatgcgtattgcggatgaattaggagaaatctttaaattcgaggcgcctggtagcgtaacgcgctttttatcaagtcagcgtctaattaaagaagcatgcgatgaatcacgctttgataaaaacttaagtcaatcgctgaaatttgggcgtgattttctgggagacgggttattcacaagctggacgcatgaaccgaattggaaaaaagcgcataatatcttaggcccaagctttagtcagcgtgcaatgaaacgttatcatgcgatgatggtcgatatcgccgtgcagcttgttcaaaagtgggagcgtctaaatgcagatgagcatattgaagtatcggaagacatgacacgtttaacgctggatacaattggtctttgcggcttcaactatcgctttaacagcttttaccgagatcagcctcatccatttattgtgagtgttgtgcgtgcactggatgaagtaatgaacaagctgcagcgagcaaatccagacgacccagcttatgatgaaaacaagcgccagtgtcaagaagatatcaaggtgatgaacgactatgtcgataaaattattgcagatcgcaaagcaaggggtgaacaaagccatgatttattaacgcagatgctaaacggaaaagatccagaaacgggtgagccgcttgatgacgggaacattcgttatcaaattattacattcttaatcgcgggacacgaaacaacaagtggtcttttatcatttgcgctgtatttcttagtgaaaaatccacatgtattacaaaaagtagcagaagaagcagcacgagttctagtagatcctgttccaagctacaaacaagtcaaacagcttaaatatgtcggcatggtcttaaacgaagcgctgcgcttatggccaactggtcctgcgttttccctatatgcaaaagaagatacggtgcttggaggagaatatcctttaaccaaaggcgacgaagtaatggttctgattcctcagcttcaccgtgataaaacaatttggggagacgatgtggaggagttccgtccagagcgttttgaaaatccaagtgcgattccgcagcatgcgtttaaaccgtttggaaacggtcagcgtgcgtgtatcggtcagcagttcgctcttcatgaagcaacgctggtacttggtatgatgctaaaacactttgactttgaagatcatacaaactacgagctcgttattaaggaacgcttaacgttaaaacctgaaggctttgtggtaaaagcaaaatcgaaaggcattccgcttggcctgattccttcacctagcactgaacagtctgctaaaaaagtacgcaaaaaggcagaaaacgctcataatacgccgctgcttgtgctatacggttcaaatgcgggaacagctgaaggaacggcgcgtgatttagcagatattgcaatgagcaaaggatttgcaccgcaggtcgcaacgcttgattcacacgccggaaatcttccgcgcgaaggagctgtattaattgtaacggcgtcttataacggtcatccgcctgataacgcaaagcaatttgtcgactggttagaccaagcgtctgctgatgaagtaaaaggcgttcgctactccgtatttggatgcggcgataaaaactgggctgcgacgtatcaaaaagtgcctgcttttatcgatgaaacgcttgccgctaaaggggcagaaaacatcgctgaccgcggtgaagcagatgcaagcgacgactttgaaggcgcgtatgaagaatggagtgatcatatgtggagtgacgtagcagcctactttaacctcgacattgaaaacagtgaagataataaatctactctttcacttcaatttgtcgacagcgccgcggatatgccgcttgcgaaaatgcacggtgcgttttcaacgaacgtcgtagcaagcaaagaacttcaacagccaggcagtgcacgaagcacgcgacatcttgaaattgaacttccaaaagaagcttcttatcaagaaggagatcatttaggtgttattcctcgcaactatgaaggaatagtaaaccgtgtaacagcaaggttcggcctaagcgcatcacagcaaatccgtctggaagcagaagaagaaaaattagctcatttgccactcgctaaaacagtatccgtagaagagcttctgcaatacgtggagcttcaagatcctgttacgcgcacgcagcttcgcgcaatggctgctaaaacggtctgcccgccgcataaagtagagcttgaagccttgcttgaaaagcaagcctacaaagaacaagtgctggcaaaacgtttaacaatgcttgaactgcttgaaaaatacccggcgtgtgaaatgaaattcagcgaatttatcgcccttctgccaagcatacgcccgcgctattactcgatttcttcatcacctcgtgtcgatgaaaaacaagcaagcatcacggtcagcgttgtctcaggaccggcgtggagcggatatggagaatataaaggaattgcgtcgaactatcttgccgagctgcaagaaggagatacgattacgtgctttatttccacagatcagtcagaatttacgctgccaaaagaccctgaaacgccgcttatcatggtcggaccgggaacaggcgtcgcgccgtttagaggctttgtgcaggcgcgcaaacagctaaaagaacaaggacagtcacttggagaagcacatttatacttcggctgccgttcacctcatgaagactatctgtatcaagaagagcttgaaaacgcccaaagcgaaggcatcattacgcttcataccgctttttctcgcatgccaaatcagccgaaaacatacgttcagcacgtaatggaacaagacggcaagaaattgattgaacttcttgatcaaggagcgcacttctatatttgcggagacggaagccaaatggcacctgccgttgaagcaacgcttatgaaaagctatgctgacgttcaccaagtgagtgaagcagacgctcgcttatggctgcagcagctagaagaaaaaggccgatacgcaaaagacgtgtgggctggg

SEQ ID NO: 428 - protein, 1049 aa, synthetic construct
  REGION 1..1049: note = Variant of cytochrome P450
MTIKEMPQPKTFGELKNLPLLNTDKPVQALMRIADELGEIFKFEAPGSVTRFLSSQRLIKEACDESRFDKNLSQSLKFGRDFLGDGLFTSWTHEPNWKKAHNILGPSFSQRAMKRYHAMMVDIAVQLVQKWERLNADEHIEVSEDMTRLTLDTIGLCGFNYRFNSFYRDQPHPFIVSVVRALDEVMNKLQRANPDDPAYDENKRQCQEDIKVMNDYVDKIIADRKARGEQSHDLLTQMLNGKDPETGEPLDDGNIRYQIITFLIAGHETTSGLLSFALYFLVKNPHVLQKVAEEAARVLVDPVPSYKQVKQLKYVGMVLNEALRLWPTGPAFSLYAKEDTVLGGEYPLTKGDEVMVLIPQLHRDKTIWGDDVEEFRPERFENPSAIPQHAFKPFGNGQRACIGQQFALHEATLVLGMMLKHFDFEDHTNYELVIKERLTLKPEGFVVKAKSKGIPLGLIPSPSTEQSAKKVRKKAENAHNTPLLVLYGSNAGTAEGTARDLADIAMSKGFAPQVATLDSHAGNLPREGAVLIVTASYNGHPPDNAKQFVDWLDQASADEVKGVRYSVFGCGDKNWAATYQKVPAFIDETLAAKGAENIADRGEADASDDFEGAYEEWSDHMWSDVAAYFNLDIENSEDNKSTLSLQFVDSAADMPLAKMHGAFSTNVVASKELQQPGSARSTRHLEIELPKEASYQEGDHLGVIPRNYEGIVNRVTARFGLSASQQIRLEAEEEKLAHLPLAKTVSVEELLQYVELQDPVTRTQLRAMAAKTVCPPHKVELEALLEKQAYKEQVLAKRLTMLELLEKYPACEMKFSEFIALLPSIRPRYYSISSSPRVDEKQASITVSVVSGPAWSGYGEYKGIASNYLAELQEGDTITCFISTDQSEFTLPKDPETPLIMVGPGTGVAPFRGFVQARKQLKEQGQSLGEAHLYFGCRSPHEDYLYQEELENAQSEGIITLHTAFSRMPNQPKTYVQHVMEQDGKKLIELLDQGAHFYICGDGSQMAPAVEATLMKSYADVHQVSEADARLWLQQLEEKGRYAKDVWAG

SEQ ID NO: 429 - DNA, 3147 bp, synthetic construct
  misc_feature 1..3147: note = Variant of cytochrome P450
  source 1..3147: mol_type = other DNA
atgacaattaaggaaatgcctcagcctaagacgtttggagaacttaaaaatttaccgttattaaacacagataaaccggttcaagctttgatgcgtattgcggatgaattaggagaaatctttaaattcgaggcgcctggtagcgtaacgcgctttttatcaagtcagcgtctaattaaagaagcatgcgatgaaagtcgctttgataaaaacttaagtcaatcgctgaaatttgcccgtgattttctgggagacgggttatttacaagctggacgcatgaaccgaattggaaaaaagcgcataatatcttaggcccaagctttagtcagcgtgcaatgaaacgttatcatgcgatgatggtcgatatcgccgtgcagcttgttcaaaagtgggagcgtctaaatgcagatgagcatattgaagtatcggaagacatgacacgtttaacgctggatacaattggtctttgcggcttcaactatcgctttaacagcttttaccgagatcagcctcatccatttattgtgagtgttgtgcgtctgctggatgaactgatgaacaagctgcagcgagcaaatccagacgacccagcttatgatgaaaacaagcgccagtgtcaagaagatgccaaggtgatgaacgactatgtcgataaaattattgcagatcgcaaagcaaggggtgaacaaagccatgatttattaacgcagatgctaaacggaaaagatccagaaacgggtgagccgcttgatgacgggaacattcgttatcaaattattacattcttaatcgcgggacacgaaacaacaagtggtcttttatcatttgcgctgtatttcttagtgaaaaatccacatgtattacaaaaagtagcagaagaagcagcacgagttctagtagatcctgttccaagctacaaacaagtcaaacagcttaaatatgtcggcatggtcttaaacgaagcgctgcgcttatggccaactggtcctgcgttttccctatatgcaaaagaagatacggtgcttggaggagaatatcctttaaccaaaggcgacgaagtaatggttctgattcctcagcttcaccgtgataaaacaatttggggagacgatgtggaggagttccgtccagagcgttttgaaaatccaagtgcgattccgcagcatgcgtttaaaccgtttggaaacggtcagcgtgcgtgtatcggtcagcagttcgctcttcatgaagcaacgctggtacttggtatgatgctaaaacactttgactttgaagatcatacaaactacgagctcgttattggcgaacgcttaacgttaaaacctgaaggctttgtggtaaaagcaaaatcgaaaggcattccgcttggcggcattccttcacctagcactgaacagtctgctaaaaaagtacgcaaaaaggcagaaaacgctcataatacgccgctgcttgtgctatacggttcaaatgcgggaacagctgaaggaacggcgcgtgatttagcagatattgcaatgagcaaaggatttgcaccgcaggtcgcaacgcttgattcacacgccggaaatcttccgcgcgaaggagctgtattaattgtaacggcgtcttataacggtcatccgcctgataacgcaaagcaatttgtcgactggttagaccaagcgtctgctgatgaagtaaaaggcgttcgctactccgtatttggatgcggcgataaaaactgggctgcgacgtatcaaaaagtgcctgcttttatcgatgaaacgcttgccgctaaaggggcagaaaacatcgctgaccgcggtgaagcagatgcaagcgacgactttgaaggcacgtatgaagaatggagtgatcatatgtggagtgacgtagcagcctactttaacctcgacattgaaaacagtgaagataataaatctactctttcacttcaatttgtcgacagcgccgcggatatgccgcttgcgaaaatgcacggtgcgttttcaacgaacgtcgtagcaagcaaagaacttcaacagccaggcagtgcacgaagcacgcgacatcttgaaattgaacttccaaaagaagcttcttatcaagaaggagatcatttaggtgttattcctcgcaactatgaaggaatagtaaaccgtgtaacagcaaggttcggcctaagcgcatcacagcaaatccgtctggaagcagaagaagaaaaattagctcatttgccactcgctaaaacagtatccgtagaagagcttctgcaatacgtggagcttcaagatcctgttacgcgcacgcagcttcgcgcaatggctgctaaaacggtctgcccgccgcataaagtagagcttgaagccttgcttgaaaagcaagcctacaaagaacaagtgctggcaaaacgtttaacaatgcttgaactgcttgaaaaatacccggcgtgtgaaatgaaattcagcgaatttatcgcccttctgccaagcatacgcccgcgctattactcgatttcttcatcacctcgtgtcgatgaaaaacaagcaagcatcacggtcagcgttgtctcaggaccggcgtggagcggatatggagaatataaaggaattgcgtcgaactatcttgccgagctgcaagaaggagatacgattacgtgctttatttccacagatcagtcagaatttacgctgccaaaagaccctgaaacgccgcttatcatggtcggaccgggaacaggcgtcgcgccgtttagaggctttgtgcaggcgcgcaaacagctaaaagaacaaggacagtcacttggagaagcacatttatacttcggctgccgttcacctcatgaagactatctgtatcaagaagagcttgaaaacgcccaaagcgaaggcatcattacgcttcataccgctttttctcgcatgccaaatcagccgaaaacatacgttcagcacgtaatggaacaagacggcaagaaattgattgaacttcttgatcaaggagcgcacttctatatttgcggagacggaagccaaatggcacctgccgttgaagcaacgcttatgaaaagctatgctgacgttcaccaagtgagtgaagcagacgctcgcttatggctgcagcagctagaagaaaaaggccgatacgcaaaagacgtgtgggctggg

SEQ ID NO: 430 - protein, 1049 aa, synthetic construct
  REGION 1..1049: note = Variant of cytochrome P450
MTIKEMPQPKTFGELKNLPLLNTDKPVQALMRIADELGEIFKFEAPGSVTRFLSSQRLIKEACDESRFDKNLSQSLKFARDFLGDGLFTSWTHEPNWKKAHNILGPSFSQRAMKRYHAMMVDIAVQLVQKWERLNADEHIEVSEDMTRLTLDTIGLCGFNYRFNSFYRDQPHPFIVSVVRLLDELMNKLQRANPDDPAYDENKRQCQEDAKVMNDYVDKIIADRKARGEQSHDLLTQMLNGKDPETGEPLDDGNIRYQIITFLIAGHETTSGLLSFALYFLVKNPHVLQKVAEEAARVLVDPVPSYKQVKQLKYVGMVLNEALRLWPTGPAFSLYAKEDTVLGGEYPLTKGDEVMVLIPQLHRDKTIWGDDVEEFRPERFENPSAIPQHAFKPFGNGQRACIGQQFALHEATLVLGMMLKHFDFEDHTNYELVIGERLTLKPEGFVVKAKSKGIPLGGIPSPSTEQSAKKVRKKAENAHNTPLLVLYGSNAGTAEGTARDLADIAMSKGFAPQVATLDSHAGNLPREGAVLIVTASYNGHPPDNAKQFVDWLDQASADEVKGVRYSVFGCGDKNWAATYQKVPAFIDETLAAKGAENIADRGEADASDDFEGTYEEWSDHMWSDVAAYFNLDIENSEDNKSTLSLQFVDSAADMPLAKMHGAFSTNVVASKELQQPGSARSTRHLEIELPKEASYQEGDHLGVIPRNYEGIVNRVTARFGLSASQQIRLEAEEEKLAHLPLAKTVSVEELLQYVELQDPVTRTQLRAMAAKTVCPPHKVELEALLEKQAYKEQVLAKRLTMLELLEKYPACEMKFSEFIALLPSIRPRYYSISSSPRVDEKQASITVSVVSGPAWSGYGEYKGIASNYLAELQEGDTITCFISTDQSEFTLPKDPETPLIMVGPGTGVAPFRGFVQARKQLKEQGQSLGEAHLYFGCRSPHEDYLYQEELENAQSEGIITLHTAFSRMPNQPKTYVQHVMEQDGKKLIELLDQGAHFYICGDGSQMAPAVEATLMKSYADVHQVSEADARLWLQQLEEKGRYAKDVWAG

SEQ ID NO: 431 - DNA, 3147 bp, synthetic construct
  misc_feature 1..3147: note = Variant of cytochrome P450
  source 1..3147: mol_type = other DNA
atgacaattaaggaaatgcctcagcctaagacgtttggagaacttaaaaatttaccgttattaaacacagataaaccggttcaagctttgatgcgtattgcggatgaattaggagaaatctttaaattcgaggcgcctggtagcgtaacgcgctttttatcaagtcagcgtctaattaaagaagcatgcgatgaacgtcgctttgataaaaacttaagtcaatcgctgaaatttgggcgtgattttctgggagacgggttattcacaagctggacgcatgaaccgaattggaaaaaagcgcataatatcttaggcccaagctttagtcagcgtgcaatgaaacgttatcatgcgatgatggtcgatatcgccgtgcagcttgttcaaaagtgggagcgtctaaatgcagatgagcatattgaagtatcggaagacatgacacgtttaacgctggatacaattggtctttgcggcttcaactatcgctttaacagcttttaccgagatcagcctcatccatttattgtgagtgttgtgcgtgcactggatgaagtcatgaacaagctgcagcgagcaaatccagacgacccagcttatgatgaaaacaagcgccagtgtcaagaagatattaaggtgatgaacgactatgtcgataaaattattgcagatcgcaaagcaaggggtgaacaaagccatgatttattaacgcagatgctaaacggaaaagatccagaaacgggtgagccgcttgatgacgggaacattcgttatcaaattattacattcttaatcgcgggacacgaaacaacaagtggtcttttatcatttgcgctgtatttcttagtgaaaaatccacatgtattacaaaaagtagcagaagaagcagcacgagttctagtagatcctgttccaagctacaaacaagtcaaacagcttaaatatgtcggcatggtcttaaacgaagcgctgcgcttatggccaactggtcctgcgttttccctatatgcaaaagaagatacggtgcttggaggagaatatcctttaaccaaaggcgacgaagtaatggttctgattcctcagcttcaccgtgataaaacaatttggggagacgatgtggaggagttccgtccagagcgttttgaaaatccaagtgcgattccgcagcatgcgtttaaaccgtttggaaacggtcagcgtgcgtgtatcggtcagcagttcgctcttcatgaagcaacgctggtacttggtatgatgctaaaacactttgactttgaagatcatacaaactacgagctcgttattggcgaacgcttaacgttaaaacctgaaggctttgtggtaaaagcaaaatcgaaaggcattccgcttggcggtattccttcacctagcactgaacagtctgctaaaaaagtacgcaaaaaggcagaaaacgctcataatacgccgctgcttgtgctatacggttcaaatgcgggaacagctgaaggaacggcgcgtgatttagcagatattgcaatgagcaaaggatttgcaccgcaggtcgcaacgcttgattcacacgccggaaatcttccgcgcgaaggagctgtattaattgtaacggcgtcttataacggtcatccgcctgataacgcaaagcaatttgtcgactggttagaccaagcgtctgctgatgaagtaaaaggcgttcgctactccgtatttggatgcggcgataaaaactgggctgcgacgtatcaaaaagtgcctgcttttatcgatgaaacgcttgccgctaaaggggcagaaaacatcgctgaccgcggtgaagcagatgcaagcgacgactttgaaggcgcgtatgaagaatggagtgatcatatgtggagtgacgtagcagcctactttaacctcgacattgaaaacagtgaagataataaatctactctttcacttcaatttgtcgacagcgccgcggatatgccgcttgcgaaaatgcacggtgcgttttcaacgaacgtcgtagcaagcaaagaacttcaacagccaggcagtgcacgaagcacgcgacatcttgaaattgaacttccaaaagaagcttcttatcaagaaggagatcatttaggtgttattcctcgcaactatgaaggaatagtaaaccgtgtaacagcaaggttcggcctaagcgcatcacagcaaatccgtctggaagcagaagaagaaaaattagctcatttgccactcgctaaaacagtatccgtagaagagcttctgcaatacgtggagcttcaagatcctgttacgcgcacgcagcttcgcgcaatggctgctaaaacggtctgcccgccgcataaagtagagcttgaagccttgcttgaaaagcaagcctacaaagaacaagtgctggcaaaacgtttaacaatgcttgaactgcttgaaaaatacccggcgtgtgaaatgaaattcagcgaatttatcgcccttctgccaagcatacgcccgcgctattactcgatttcttcatcacctcgtgtcgatgaaaaacaagcaagcatcacggtcagcgttgtctcaggaccggcgtggagcggatatggagaatataaaggaattgcgtcgaactatcttgccgagctgcaagaaggagatacgattacgtgctttatttccacagatcagtcagaatttacgctgccaaaagaccctgaaacgccgcttatcatggtcggaccgggaacaggcgtcgcgccgtttagaggctttgtgcaggcgcgcaaacagctaaaagaacaaggacagtcacttggagaagcacatttatacttcggctgccgttcacctcatgaagactatctgtatcaagaagagcttgaaaacgcccaaagcgaaggcatcattacgcttcataccgctttttctcgcatgccaaatcagccgaaaacatacgttcagcacgtaatggaacaagacggcaagaaattgattgaacttcttgatcaaggagcgcacttctatatttgcggagacggaagccaaatggcacctgccgttgaagcaacgcttatgaaaagctatgctgacgttcaccaagtgagtgaagcagacgctcgcttatggctgcagcagctagaagaaaaaggccgatacgcaaaagacgtgtgggctggg

SEQ ID NO: 432 - protein, 1049 aa, synthetic construct
  REGION 1..1049: note = Variant of cytochrome P450
MTIKEMPQPKTFGELKNLPLLNTDKPVQALMRIADELGEIFKFEAPGSVTRFLSSQRLIKEACDERRFDKNLSQSLKFGRDFLGDGLFTSWTHEPNWKKAHNILGPSFSQRAMKRYHAMMVDIAVQLVQKWERLNADEHIEVSEDMTRLTLDTIGLCGFNYRFNSFYRDQPHPFIVSVVRALDEVMNKLQRANPDDPAYDENKRQCQEDIKVMNDYVDKIIADRKARGEQSHDLLTQMLNGKDPETGEPLDDGNIRYQIITFLIAGHETTSGLLSFALYFLVKNPHVLQKVAEEAARVLVDPVPSYKQVKQLKYVGMVLNEALRLWPTGPAFSLYAKEDTVLGGEYPLTKGDEVMVLIPQLHRDKTIWGDDVEEFRPERFENPSAIPQHAFKPFGNGQRACIGQQFALHEATLVLGMMLKHFDFEDHTNYELVIGERLTLKPEGFVVKAKSKGIPLGGIPSPSTEQSAKKVRKKAENAHNTPLLVLYGSNAGTAEGTARDLADIAMSKGFAPQVATLDSHAGNLPREGAVLIVTASYNGHPPDNAKQFVDWLDQASADEVKGVRYSVFGCGDKNWAATYQKVPAFIDETLAAKGAENIADRGEADASDDFEGAYEEWSDHMWSDVAAYFNLDIENSEDNKSTLSLQFVDSAADMPLAKMHGAFSTNVVASKELQQPGSARSTRHLEIELPKEASYQEGDHLGVIPRNYEGIVNRVTARFGLSASQQIRLEAEEEKLAHLPLAKTVSVEELLQYVELQDPVTRTQLRAMAAKTVCPPHKVELEALLEKQAYKEQVLAKRLTMLELLEKYPACEMKFSEFIALLPSIRPRYYSISSSPRVDEKQASITVSVVSGPAWSGYGEYKGIASNYLAELQEGDTITCFISTDQSEFTLPKDPETPLIMVGPGTGVAPFRGFVQARKQLKEQGQSLGEAHLYFGCRSPHEDYLYQEELENAQSEGIITLHTAFSRMPNQPKTYVQHVMEQDGKKLIELLDQGAHFYICGDGSQMAPAVEATLMKSYADVHQVSEADARLWLQQLEEKGRYAKDVWAG

SEQ ID NO: 433 - DNA, 3147 bp, synthetic construct
  misc_feature 1..3147: note = Variant of cytochrome P450
  source 1..3147: mol_type = other DNA
atgacaattaaggaaatgcctcagcctaagacgtttggagaacttaaaaatttaccgttattaaacacagataaaccggttcaagctttgatgcgtattgcggatgaattaggagaaatctttaaattcgaggcgcctggtagcgtaacgcgctttttatcaagtcagcgtctaattaaagaagcatgcgatgaatcacgctttgataaaaacttaagtcaatcgctgaaatttgggcgtgattttctgggagacgggttatttacaagctggacgcatgaaccgaattggaaaaaagcgcataatatcttaggcccaagctttagtcagcgtgcaatgaaacgttatcatgcgatgatggtcgatatcgccgtgcagcttgttcaaaagtgggagcgtctaaatgcagatgagcatattgaagtatcggaagacatgacacgtttaacgctggatacaattggtctttgcggcttcaactatcgctttaacagcttttaccgagatcagcctcatccatttattgtgagtgttgtgcgtgcactggatgaagtaatgaacaagctgcagcgagcaaatccagacgacccagcttatgatgaaaacaagcgccagtgtcaagaagatatcaaggtgatgaacgactatgtcgataaaattattgcagatcgcaaagcaaggggtgaacaaagccatgatttattaacgcagatgctaaacggaaaagatccagaaacgggtgagccgcttgatgacgggaacattcgttatcaaattattacattcttaatcgcgggacacgaaacaacaagtggtcttttatcatttgcgctgtatttcttagtgaaaaatccacatgtattacaaaaagtagcagaagaagcagcacgagttctagtagatcctgttccaagctacaaacaagtcaaacagcttaaatatgtcggcatggtcttaaacgaagcgctgcgcttatggccaactggtcctgcgttttccctatatgcaaaagaagatacggtgcttggaggagaatatcctttaaccaaaggcgacgaagtaatggttctgattcctcagcttcaccgtgataaaacaatttggggagacgatgtggaggagttccgtccagagcgttttgaaaatccaagtgcgattccgcagcatgcgtttaaaccgtttggaaacggtcagcgtgcgtgtatcggtcagcagttcgctcttcatgaagcaacgctggtacttggtatgatgctaaaacactttgactttgaagatcatacaaactacgagctcgttattggcgaacgcttaacgttaaaacctgaaggctttgtggtaaaagcaaaatcgaaaggcattccgcttggcggcattccttcacctagcactgaacagtctgctaaaaaagtacgcaaaaaggcagaaaacgctcataatacgccgctgcttgtgctatacggttcaaatgcgggaacagctgaaggaacggcgcgtgatttagcagatattgcaatgagcaaaggatttgcaccgcaggtcgcaacgcttgattcacacgccggaaatcttccgcgcgaaggagctgtattaattgtaacggcgtcttataacggtcatccgcctgataacgcaaagcaatttgtcgactggttagaccaagcgtctgctgatgaagtaaaaggcgttcgctactccgtatttggatgcggcgataaaaactgggctgcgacgtatcaaaaagtgcctgcttttatcgatgaaacgcttgccgctaaaggggcagaaaacatcgctgaccgcggtgaagcagatgcaagcgacgactttgaaggcacatatgaagaatggagtgatcatatgtggagtgacgtagcagcctactttaacctcgacattgaaaacagtgaagataataaatctactctttcacttcaatttgtcgacagcgccgcggatatgccgcttgcgaaaatgcacggtgcgttttcaacgaacgtcgtagcaagcaaagaacttcaacagccaggcagtgcacgaagcacgcgacatcttgaaattgaacttccaaaagaagcttcttatcaagaaggagatcatttaggtgttattcctcgcaactatgaaggaatagtaaaccgtgtaacagcaaggttcggcctaagcgcatcacagcaaatccgtctggaagcagaagaagaaaaattagctcatttgccactcgctaaaacagtatccgtagaagagcttctgcaatacgtggagcttcaagatcctgttacgcgcacgcagcttcgcgcaatggctgctaaaacggtctgcccgccgcataaagtagagcttgaagccttgcttgaaaagcaagcctacaaagaacaagtgctggcaaaacgtttaacaatgcttgaactgcttgaaaaatacccggcgtgtgaaatgaaattcagcgaatttatcgcccttctgccaagcatacgcccgcgctattactcgatttcttcatcacctcgtgtcgatgaaaaacaagcaagcatcacggtcagcgttgtctcaggaccggcgtggagcggatatggagaatataaaggaattgcgtcgaactatcttgccgagctgcaagaaggagatacgattacgtgctttatttccacagatcagtcagaatttacgctgccaaaagaccctgaaacgccgcttatcatggtcggaccgggaacaggcgtcgcgccgtttagaggctttgtgcaggcgcgcaaacagctaaaagaacaaggacagtcacttggagaagcacatttatacttcggctgccgttcacctcatgaagactatctgtatcaagaagagcttgaaaacgcccaaagcgaaggcatcattacgcttcataccgctttttctcgcatgccaaatcagccgaaaacatacgttcagcacgtaatggaacaagacggcaagaaattgattgaacttcttgatcaaggagcgcacttctatatttgcggagacggaagccaaatggcacctgccgttgaagcaacgcttatgaaaagctatgctgacgttcaccaagtgagtgaagcagacgctcgcttatggctgcagcagctagaagaaaaaggccgatacgcaaaagacgtgtgggctggg

SEQ ID NO: 434 - protein, 1049 aa, synthetic construct
  REGION 1..1049: note = Variant of cytochrome P450
MTIKEMPQPKTFGELKNLPLLNTDKPVQALMRIADELGEIFKFEAPGSVTRFLSSQRLIKEACDESRFDKNLSQSLKFGRDFLGDGLFTSWTHEPNWKKAHNILGPSFSQRAMKRYHAMMVDIAVQLVQKWERLNADEHIEVSEDMTRLTLDTIGLCGFNYRFNSFYRDQPHPFIVSVVRALDEVMNKLQRANPDDPAYDENKRQCQEDIKVMNDYVDKIIADRKARGEQSHDLLTQMLNGKDPETGEPLDDGNIRYQIITFLIAGHETTSGLLSFALYFLVKNPHVLQKVAEEAARVLVDPVPSYKQVKQLKYVGMVLNEALRLWPTGPAFSLYAKEDTVLGGEYPLTKGDEVMVLIPQLHRDKTIWGDDVEEFRPERFENPSAIPQHAFKPFGNGQRACIGQQFALHEATLVLGMMLKHFDFEDHTNYELVIGERLTLKPEGFVVKAKSKGIPLGGIPSPSTEQSAKKVRKKAENAHNTPLLVLYGSNAGTAEGTARDLADIAMSKGFAPQVATLDSHAGNLPREGAVLIVTASYNGHPPDNAKQFVDWLDQASADEVKGVRYSVFGCGDKNWAATYQKVPAFIDETLAAKGAENIADRGEADASDDFEGTYEEWSDHMWSDVAAYFNLDIENSEDNKSTLSLQFVDSAADMPLAKMHGAFSTNVVASKELQQPGSARSTRHLEIELPKEASYQEGDHLGVIPRNYEGIVNRVTARFGLSASQQIRLEAEEEKLAHLPLAKTVSVEELLQYVELQDPVTRTQLRAMAAKTVCPPHKVELEALLEKQAYKEQVLAKRLTMLELLEKYPACEMKFSEFIALLPSIRPRYYSISSSPRVDEKQASITVSVVSGPAWSGYGEYKGIASNYLAELQEGDTITCFISTDQSEFTLPKDPETPLIMVGPGTGVAPFRGFVQARKQLKEQGQSLGEAHLYFGCRSPHEDYLYQEELENAQSEGIITLHTAFSRMPNQPKTYVQHVMEQDGKKLIELLDQGAHFYICGDGSQMAPAVEATLMKSYADVHQVSEADARLWLQQLEEKGRYAKDVWAG

SEQ ID NO: 435 - DNA, 3147 bp, synthetic construct
  misc_feature 1..3147: note = Variant of cytochrome P450
  source 1..3147: mol_type = other DNA
atgacaattaaggaaatgcctcagcctaagacgtttggagaacttaaaaatttaccgttattaaacacagataaaccggttcaagctttgatgcgtattgcggatgaattaggagaaatctttaaattcgaggcgcctggtagcgtaacgcgctttttatcaagtcagcgtctaattaaagaagcatgcgatgaacgtcgctttgataaaaacttaagtcaatcgctgaaatttgcccgtgcttttctgggagacgggttatttacaagctggacgcatgaaccgaattggaaaaaagcgcataatatcttaggcccaagctttagtcagcgtgcaatgaaacgttatcatgcgatgatggtcgatatcgccgtgcagcttgttcaaaagtgggagcgtctaaatgcagatgagcatattgaagtatcggaagacatgacacgtttaacgctggatacaattggtctttgcggcttcaactatcgctttaacagcttttaccgagatcagcctcatccatttattgtgagtgttgtgcgtgcactggatgaagtaatgaacaagctgcagcgagcaaatccagacgacccagcttatgatgaaaacaagcgccagtttcaagaagatatcaaggtgatgaacgactatgtcgataaaattattgcagatcgcaaagcaaggggtgaacaaagccatgatttattaacgcagatgctaaacggaaaagatccagaaacgggtgagccgcttgatgacgggaacattcgttatcaaattattacattcttaatcgcgggacacgaaacaacaagtggtcttttatcatttgcgctgtatttcttagtgaaaaatccacatgtattacaaaaagtagcagaagaagcagcacgagttctagtagatcctgttccaagctacaaacaagtcaaacagcttaaatatgtcggcatggtcttaaacgaagcgctgcgcttatggccaactggtcctgcgttttccctatatgcaaaagaagatacggtgcttggaggagaatatcctttaaccaaaggcgacgaagtaatggttctgattcctcagcttcaccgtgataaaacaatttggggagacgatgtggaggagttccgtccagagcgttttgaaaatccaagtgcgattccgcagcatgcgtttaaaccgtttggaaacggtcagcgtgcgtgtatcggtcagcagttcgctcttcatgaagcaacgctggtacttggtatgatgctaaaacactttgactttgaagatcatacaaactacgagctcgttattaaggaacgcttaacgttaaaacctgaaggctttgtggtaaaagcaaaatcgaaaggcattccgcttggcctgattccttcacctagcactgaacagtctgctaaaaaagtacgcaaaaaggcagaaaacgctcataatacgccgctgcttgtgctatacggttcaaatgcgggaacagctgaaggaacggcgcgtgatttagcagatattgcaatgagcaaaggatttgcaccgcaggtcgcaacgcttgattcacacgccggaaatcttccgcgcgaaggagctgtattaattgtaacggcgtcttataacggtcatccgcctgataacgcaaagcaatttgtcgactggttagaccaagcgtctgctgatgaagtaaaaggcgttcgctactccgtatttggatgcggcgataaaaactgggctgcgacgtatcaaaaagtgcctgcttttatcgatgaaacgcttgccgctaaaggggcagaaaacatcgctgaccgcggtgaagcagatgcaagcgacgactttgaaggcacatatgaagaatggagtgatcatatgtggagtgacgtagcagcctactttaacctcgacattgaaaacagtgaagataataaatctactctttcacttcaatttgtcgacagcgccgcggatatgccgcttgcgaaaatgcacggtgcgttttcaacgaacgtcgtagcaagcaaagaacttcaacagccaggcagtgcacgaagcacgcgacatcttgaaattgaacttccaaaagaagcttcttatcaagaaggagatcatttaggtgttattcctcgcaactatgaaggaatagtaaaccgtgtaacagcaaggttcggcctaagcgcatcacagcaaatccgtctggaagcagaagaagaaaaattagctcatttgccactcgctaaaacagtatccgtagaagagcttctgcaatacgtggagcttcaagatcctgttacgcgcacgcagcttcgcgcaatggctgctaaaacggtctgcccgccgcataaagtagagcttgaagccttgcttgaaaagcaagcctacaaagaacaagtgctggcaaaacgtttaacaatgcttgaactgcttgaaaaatacccggcgtgtgaaatgaaattcagcgaatttatcgcccttctgccaagcatacgcccgcgctattactcgatttcttcatcacctcgtgtcgatgaaaaacaagcaagcatcacggtcagcgttgtctcaggaccggcgtggagcggatatggagaatataaaggaattgcgtcgaactatcttgccgagctgcaagaaggagatacgattacgtgctttatttccacagatcagtcagaatttacgctgccaaaagaccctgaaacgccgcttatcatggtcggaccgggaacaggcgtcgcgccgtttagaggctttgtgcaggcgcgcaaacagctaaaagaacaaggacagtcacttggagaagcacatttatacttcggctgccgttcacctcatgaagactatctgtatcaagaagagcttgaaaacgcccaaagcgaaggcatcattacgcttcataccgctttttctcgcatgccaaatcagccgaaaacatacgttcagcacgtaatggaacaagacggcaagaaattgattgaacttcttgatcaaggagcgcacttctatatttgcggagacggaagccaaatggcacctgccgttgaagcaacgcttatgaaaagctatgctgacgttcaccaagtgagtgaagcagacgctcgcttatggctgcagcagctagaagaaaaaggccgatacgcaaaagacgtgtgggctggg

SEQ ID NO: 436 - protein, 1049 aa, synthetic construct
  REGION 1..1049: note = Variant of cytochrome P450
MTIKEMPQPKTFGELKNLPLLNTDKPVQALMRIADELGEIFKFEAPGSVTRFLSSQRLIKEACDERRFDKNLSQSLKFARAFLGDGLFTSWTHEPNWKKAHNILGPSFSQRAMKRYHAMMVDIAVQLVQKWERLNADEHIEVSEDMTRLTLDTIGLCGFNYRFNSFYRDQPHPFIVSVVRALDEVMNKLQRANPDDPAYDENKRQFQEDIKVMNDYVDKIIADRKARGEQSHDLLTQMLNGKDPETGEPLDDGNIRYQIITFLIAGHETTSGLLSFALYFLVKNPHVLQKVAEEAARVLVDPVPSYKQVKQLKYVGMVLNEALRLWPTGPAFSLYAKEDTVLGGEYPLTKGDEVMVLIPQLHRDKTIWGDDVEEFRPERFENPSAIPQHAFKPFGNGQRACIGQQFALHEATLVLGMMLKHFDFEDHTNYELVIKERLTLKPEGFVVKAKSKGIPLGLIPSPSTEQSAKKVRKKAENAHNTPLLVLYGSNAGTAEGTARDLADIAMSKGFAPQVATLDSHAGNLPREGAVLIVTASYNGHPPDNAKQFVDWLDQASADEVKGVRYSVFGCGDKNWAATYQKVPAFIDETLAAKGAENIADRGEADASDDFEGTYEEWSDHMWSDVAAYFNLDIENSEDNKSTLSLQFVDSAADMPLAKMHGAFSTNVVASKELQQPGSARSTRHLEIELPKEASYQEGDHLGVIPRNYEGIVNRVTARFGLSASQQIRLEAEEEKLAHLPLAKTVSVEELLQYVELQDPVTRTQLRAMAAKTVCPPHKVELEALLEKQAYKEQVLAKRLTMLELLEKYPACEMKFSEFIALLPSIRPRYYSISSSPRVDEKQASITVSVVSGPAWSGYGEYKGIASNYLAELQEGDTITCFISTDQSEFTLPKDPETPLIMVGPGTGVAPFRGFVQARKQLKEQGQSLGEAHLYFGCRSPHEDYLYQEELENAQSEGIITLHTAFSRMPNQPKTYVQHVMEQDGKKLIELLDQGAHFYICGDGSQMAPAVEATLMKSYADVHQVSEADARLWLQQLEEKGRYAKDVWAG

SEQ ID NO: 437 - DNA, 3147 bp, synthetic construct
  misc_feature 1..3147: note = Variant of cytochrome P450
  source 1..3147: mol_type = other DNA
atgacaattaaggaaatgcctcagcctaagacgtttggagaacttaaaaatttaccgttattaaacacagataaaccggttcaagctttgatgcgtattgcggatgaattaggagaaatctttaaattcgaggcgcctggtagcgtaacgcgctttttatcaagtcagcgtctaattaaagaagcatgcgatgaatcacgctttgataaaaacttaagtcaatcgctgaaatttgggcgtgattttctgggagacgggttatttacaagctggacgcatgaaccgaattggaaaaaagcgcataatatcttaggcccaagctttagtcagcgtgcaatgaaacgttatcatgcgatgatggtcgatatcgccgtgcagcttgttcaaaagtgggagcgtctaaatgcagatgagcatattgaagtatcggaagacatgacacgtttaacgctggatacaattggtctttgcggcttcaactatcgctttaacagcttttaccgagatcagcctcatccatttattgtgagtgttgtgcgtgcactggatgaagtaatgaacaagctgcagcgagcaaatccagacgacccagcttatgatgaaaacaagcgccagtgtcaagaagatatcaaggtgatgaacgactatgtcgataaaattattgcagatcgcaaagcaaggggtgaacaaagccatgatttattaacgcagatgctaaacggaaaagatccagaaacgggtgagccgcttgatgacgggaacattcgttatcaaattattacattcttaatcgcgggacacgaaacaacaagtggtcttttatcatttgcgctgtatttcttagtgaaaaatccacatgtattacaaaaagtagcagaagaagcagcacgagttctagtagatcctgttccaagctacaaacaagtcaaacagcttaaatatgtcggcatggtcttaaacgaagcgctgcgcttatggccaactggtcctgcgttttccctatatgcaaaagaagatacggtgcttggaggagaatatcctttaaccaaaggcgacgaagtaatggttctgattcctcagcttcaccgtgataaaacaatttggggagacgatgtggaggagttccgtccagagcgttttgaaaatccaagtgcgattccgcagcatgcgtttaaaccgtttggaaacggtcagcgtgcgtgtatcggtcagcagttcgctcttcatgaagcaacgctggtacttggtatgatgctaaaacactttgactttgaagatcatacaaactacgagctcgttattaaggaacgcttaacgttaaaacctgaaggctttgtggtaaaagcaaaatcgaaaggcattccgcttggcctgattccttcacctagcactgaacagtctgctaaaaaagtacgcaaaaaggcagaaaacgctcataatacgccgctgcttgtgctatacggttcaaatgcgggaacagctgaaggaacggcgcgtgatttagcagatattgcaatgagcaaaggatttgcaccgcaggtcgcaacgcttgattcacacgccggaaatcttccgcgcgaaggagctgtattaattgtaacggcgtcttataacggtcatccgcctgataacgcaaagcaatttgtcgactggttagaccaagcgtctgctgatgaagtaaaaggcgttcgctactccgtatttggatgcggcgataaaaactgggctgcgacgtatcaaaaagtgcctgcttttatcgatgaaacgcttgccgctaaaggggcagaaaacatcgctgaccgcggtgaagcagatgcaagcgacgactttgaaggcacgtatgaagaatggagtgatcatatgtggagtgacgtagcagcctactttaacctcgacattgaaaacagtgaagataataaatctactctttcacttcaatttgtcgacagcgccgcggatatgccgcttgcgaaaatgcacggtgcgttttcaacgaacgtcgtagcaagcaaagaacttcaacagccaggcagtgcacgaagcacgcgacatcttgaaattgaacttccaaaagaagcttcttatcaagaaggagatcatttaggtgttattcctcgcaactatgaaggaatagtaaaccgtgtaacagcaaggttcggcctaagcgcatcacagcaaatccgtctggaagcagaagaagaaaaattagctcatttgccactcgctaaaacagtatccgtagaagagcttctgcaatacgtggagcttcaagatcctgttacgcgcacgcagcttcgcgcaatggctgctaaaacggtctgcccgccgcataaagtagagcttgaagccttgcttgaaaagcaagcctacaaagaacaagtgctggcaaaacgtttaacaatgcttgaactgcttgaaaaatacccggcgtgtgaaatgaaattcagcgaatttatcgcccttctgccaagcatacgcccgcgctattactcgatttcttcatcacctcgtgtcgatgaaaaacaagcaagcatcacggtcagcgttgtctcaggaccggcgtggagcggatatggagaatataaaggaattgcgtcgaactatcttgccgagctgcaagaaggagatacgattacgtgctttatttccacagatcagtcagaatttacgctgccaaaagaccctgaaacgccgcttatcatggtcggaccgggaacaggcgtcgcgccgtttagaggctttgtgcaggcgcgcaaacagctaaaagaacaaggacagtcacttggagaagcacatttatacttcggctgccgttcacctcatgaagactatctgtatcaagaagagcttgaaaacgcccaaagcgaaggcatcattacgcttcataccgctttttctcgcatgccaaatcagccgaaaacatacgttcagcacgtaatggaacaagacggcaagaaattgattgaacttcttgatcaaggagcgcacttctatatttgcggagacggaagccaaatggcacctgccgttgaagcaacgcttatgaaaagctatgctgacgttcaccaagtgagtgaagcagacgctcgcttatggctgcagcagctagaagaaaaaggccgatacgcaaaagacgtgtgggctggg

SEQ ID NO: 438 - protein, 1049 aa, synthetic construct
  REGION 1..1049: note = Variant of cytochrome P450
MTIKEMPQPKTFGELKNLPLLNTDKPVQALMRIADELGEIFKFEAPGSVTRFLSSQRLIKEACDESRFDKNLSQSLKFGRDFLGDGLFTSWTHEPNWKKAHNILGPSFSQRAMKRYHAMMVDIAVQLVQKWERLNADEHIEVSEDMTRLTLDTIGLCGFNYRFNSFYRDQPHPFIVSVVRALDEVMNKLQRANPDDPAYDENKRQCQEDIKVMNDYVDKIIADRKARGEQSHDLLTQMLNGKDPETGEPLDDGNIRYQIITFLIAGHETTSGLLSFALYFLVKNPHVLQKVAEEAARVLVDPVPSYKQVKQLKYVGMVLNEALRLWPTGPAFSLYAKEDTVLGGEYPLTKGDEVMVLIPQLHRDKTIWGDDVEEFRPERFENPSAIPQHAFKPFGNGQRACIGQQFALHEATLVLGMMLKHFDFEDHTNYELVIKERLTLKPEGFVVKAKSKGIPLGLIPSPSTEQSAKKVRKKAENAHNTPLLVLYGSNAGTAEGTARDLADIAMSKGFAPQVATLDSHAGNLPREGAVLIVTASYNGHPPDNAKQFVDWLDQASADEVKGVRYSVFGCGDKNWAATYQKVPAFIDETLAAKGAENIADRGEADASDDFEGTYEEWSDHMWSDVAAYFNLDIENSEDNKSTLSLQFVDSAADMPLAKMHGAFSTNVVASKELQQPGSARSTRHLEIELPKEASYQEGDHLGVIPRNYEGIVNRVTARFGLSASQQIRLEAEEEKLAHLPLAKTVSVEELLQYVELQDPVTRTQLRAMAAKTVCPPHKVELEALLEKQAYKEQVLAKRLTMLELLEKYPACEMKFSEFIALLPSIRPRYYSISSSPRVDEKQASITVSVVSGPAWSGYGEYKGIASNYLAELQEGDTITCFISTDQSEFTLPKDPETPLIMVGPGTGVAPFRGFVQARKQLKEQGQSLGEAHLYFGCRSPHEDYLYQEELENAQSEGIITLHTAFSRMPNQPKTYVQHVMEQDGKKLIELLDQGAHFYICGDGSQMAPAVEATLMKSYADVHQVSEADARLWLQQLEEKGRYAKDVWAG

SEQ ID NO: 439 - DNA, 3147 bp, synthetic construct
  misc_feature 1..3147: note = Variant of cytochrome P450
  source 1..3147: mol_type = other DNA
atgacaattaaggaaatgcctcagcctaagacgtttggagaacttaaaaatttaccgttattaaacacagataaaccggttcaagctttgatgcgtattgcggatgaattaggagaaatctttaaattcgaggcgcctggtagcgtaacgcgctttttatcaagtcagcgtctaattaaagaagcatgcgatgaaagtcgctttgataaaaacttaagtcaatcgctgaaatttgcccgtgcttttctgggagacgggttatttacaagctggacgcatgaaccgaattggaaaaaagcgcataatatcttaggcccaagctttagtcagcgtgcaatgaaacgttatcatgcgatgatggtcgatatcgccgtgcagcttgttcaaaagtgggagcgtctaaatgcagatgagcatattgaagtatcggaagacatgacacgtttaacgctggatacaattggtctttgcggcttcaactatcgctttaacagcttttaccgagatcagcctcatccatttattgtgagtgttgtgcgtgcactggatgaagtaatgaacaagctgcagcgagcaaatccagacgacccagcttatgatgaaaacaagcgccagtttcaagaagatatcaaggtgatgaacgactatgtcgataaaattattgcagatcgcaaagcaaggggtgaacaaagccatgatttattaacgcagatgctaaacggaaaagatccagaaacgggtgagccgcttgatgacgggaacattcgttatcaaattattacattcttaatcgcgggacacgaaacaacaagtggtcttttatcatttgcgctgtatttcttagtgaaaaatccacatgtattacaaaaagtagcagaagaagcagcacgagttctagtagatcctgttccaagctacaaacaagtcaaacagcttaaatatgtcggcatggtcttaaacgaagcgctgcgcttatggccaactggtcctgcgttttccctatatgcaaaagaagatacggtgcttggaggagaatatcctttaaccaaaggcgacgaagtaatggttctgattcctcagcttcaccgtgataaaacaatttggggagacgatgtggaggagttccgtccagagcgttttgaaaatccaagtgcgattccgcagcatgcgtttaaaccgtttggaaacggtcagcgtgcgtgtatcggtcagcagttcgctcttcatgaagcaacgctggtacttggtatgatgctaaaacactttgactttgaagatcatacaaactacgagctcgttattggcgaacgcttaacgttaaaacctgaaggctttgtggtaaaagcaaaatcgaaaggcattccgcttggcggtattccttcacctagcactgaacagtctgctaaaaaagtacgcaaaaaggcagaaaacgctcataatacgccgctgcttgtgctatacggttcaaatgcgggaacagctgaaggaacggcgcgtgatttagcagatattgcaatgagcaaaggatttgcaccgcaggtcgcaacgcttgattcacacgccggaaatcttccgcgcgaaggagctgtattaattgtaacggcgtcttataacggtcatccgcctgataacgcaaagcaatttgtcgactggttagaccaagcgtctgctgatgaagtaaaaggcgttcgctactccgtatttggatgcggcgataaaaactgggctgcgacgtatcaaaaagtgcctgcttttatcgatgaaacgcttgccgctaaaggggcagaaaacatcgctgaccgcggtgaagcagatgcaagcgacgactttgaaggcacgtatgaagaatggagtgatcatatgtggagtgacgtagcagcctactttaacctcgacattgaaaacagtgaagataataaatctactctttcacttcaatttgtcgacagcgccgcggatatgccgcttgcgaaaatgcacggtgcgttttcaacgaacgtcgtagcaagcaaagaacttcaacagccaggcagtgcacgaagcacgcgacatcttgaaattgaacttccaaaagaagcttcttatcaagaaggagatcatttaggtgttattcctcgcaactatgaaggaatagtaaaccgtgtaacagcaaggttcggcctaagcgcatcacagcaaatccgtctggaagcagaagaagaaaaattagctcatttgccactcgctaaaacagtatccgtagaagagcttctgcaatacgtggagcttcaagatcctgttacgcgcacgcagcttcgcgcaatggctgctaaaacggtctgcccgccgcataaagtagagcttgaagccttgcttgaaaagcaagcctacaaagaacaagtgctggcaaaacgtttaacaatgcttgaactgcttgaaaaatacccggcgtgtgaaatgaaattcagcgaatttatcgcccttctgccaagcatacgcccgcgctattactcgatttcttcatcacctcgtgtcgatgaaaaacaagcaagcatcacggtcagcgttgtctcaggaccggcgtggagcggatatggagaatataaaggaattgcgtcgaactatcttgccgagctgcaagaaggagatacgattacgtgctttatttccacagatcagtcagaatttacgctgccaaaagaccctgaaacgccgcttatcatggtcggaccgggaacaggcgtcgcgccgtttagaggctttgtgcaggcgcgcaaacagctaaaagaacaaggacagtcacttggagaagcacatttatacttcggctgccgttcacctcatgaagactatctgtatcaagaagagcttgaaaacgcccaaagcgaaggcatcattacgcttcataccgctttttctcgcatgccaaatcagccgaaaacatacgttcagcacgtaatggaacaagacggcaagaaattgattgaacttcttgatcaaggagcgcacttctatatttgcggagacggaagccaaatggcacctgccgttgaagcaacgcttatgaaaagctatgctgacgttcaccaagtgagtgaagcagacgctcgcttatggctgcagcagctagaagaaaaaggccgatacgcaaaagacgtgtgggctggg

SEQ ID NO: 440 - protein, 1049 aa, synthetic construct
  REGION 1..1049: note = Variant of cytochrome P450
MTIKEMPQPKTFGELKNLPLLNTDKPVQALMRIADELGEIFKFEAPGSVTRFLSSQRLIKEACDESRFDKNLSQSLKFARAFLGDGLFTSWTHEPNWKKAHNILGPSFSQRAMKRYHAMMVDIAVQLVQKWERLNADEHIEVSEDMTRLTLDTIGLCGFNYRFNSFYRDQPHPFIVSVVRALDEVMNKLQRANPDDPAYDENKRQFQEDIKVMNDYVDKIIADRKARGEQSHDLLTQMLNGKDPETGEPLDDGNIRYQIITFLIAGHETTSGLLSFALYFLVKNPHVLQKVAEEAARVLVDPVPSYKQVKQLKYVGMVLNEALRLWPTGPAFSLYAKEDTVLGGEYPLTKGDEVMVLIPQLHRDKTIWGDDVEEFRPERFENPSAIPQHAFKPFGNGQRACIGQQFALHEATLVLGMMLKHFDFEDHTNYELVIGERLTLKPEGFVVKAKSKGIPLGGIPSPSTEQSAKKVRKKAENAHNTPLLVLYGSNAGTAEGTARDLADIAMSKGFAPQVATLDSHAGNLPREGAVLIVTASYNGHPPDNAKQFVDWLDQASADEVKGVRYSVFGCGDKNWAATYQKVPAFIDETLAAKGAENIADRGEADASDDFEGTYEEWSDHMWSDVAAYFNLDIENSEDNKSTLSLQFVDSAADMPLAKMHGAFSTNVVASKELQQPGSARSTRHLEIELPKEASYQEGDHLGVIPRNYEGIVNRVTARFGLSASQQIRLEAEEEKLAHLPLAKTVSVEELLQYVELQDPVTRTQLRAMAAKTVCPPHKVELEALLEKQAYKEQVLAKRLTMLELLEKYPACEMKFSEFIALLPSIRPRYYSISSSPRVDEKQASITVSVVSGPAWSGYGEYKGIASNYLAELQEGDTITCFISTDQSEFTLPKDPETPLIMVGPGTGVAPFRGFVQARKQLKEQGQSLGEAHLYFGCRSPHEDYLYQEELENAQSEGIITLHTAFSRMPNQPKTYVQHVMEQDGKKLIELLDQGAHFYICGDGSQMAPAVEATLMKSYADVHQVSEADARLWLQQLEEKGRYAKDVWAG

SEQ ID NO: 441 - DNA, 3147 bp, synthetic construct
  misc_feature 1..3147: note = Variant of cytochrome P450
  source 1..3147: mol_type = other DNA
atgacaattaaggaaatgcctcagcctaagacgtttggagaacttaaaaatttaccgttattaaacacagataaaccggttcaagctttgatgcgtattgcggatgaattaggagaaatctttaaattcgaggcgcctggtagcgtaacgcgctttttatcaagtcagcgtctaattaaagaagcatgcgatgaatcacgctttgataaaaacttaagtcaatcgctgaaatttgcccgtgattttctgggagacgggttatttacaagctggacgcatgaaccgaattggaaaaaagcgcataatatcttaggcccaagctttagtcagcgtgcaatgaaacgttatcatgcgatgatggtcgatatcgccgtgcagcttgttcaaaagtgggagcgtctaaatgcagatgagcatattgaagtatcggaagacatgacacgtttaacgctggatacaattggtctttgcggcttcaactatcgctttaacagcttttaccgagatcagcctcatccatttattgtgagtgttgtgcgtctgctggatgaagtcatgaacaagctgcagcgagcaaatccagacgacccagcttatgatgaaaacaagcgccagtgtcaagaagatgccaaggtgatgaacgactatgtcgataaaattattgcagatcgcaaagcaaggggtgaacaaagccatgatttattaacgcagatgctaaacggaaaagatccagaaacgggtgagccgcttgatgacgggaacattcgttatcaaattattacattcttaatcgcgggacacgaaacaacaagtggtcttttatcatttgcgctgtatttcttagtgaaaaatccacatgtattacaaaaagtagcagaagaagcagcacgagttctagtagatcctgttccaagctacaaacaagtcaaacagcttaaatatgtcggcatggtcttaaacgaagcgctgcgcttatggccaactggtcctgcgttttccctatatgcaaaagaagatacggtgcttggaggagaatatcctttaaccaaaggcgacgaagtaatggttctgattcctcagcttcaccgtgataaaacaatttggggagacgatgtggaggagttccgtccagagcgttttgaaaatccaagtgcgattccgcagcatgcgtttaaaccgtttggaaacggtcagcgtgcgtgtatcggtcagcagttcgctcttcatgaagcaacgctggtacttggtatgatgctaaaacactttgactttgaagatcatacaaactacgagctcgttattaaagaaaagttaacgttaaaacctgaaggctttgtggtaaaagcaaaatcgaaaggcattccgcttggcctgattccttcacctagcactgaacagtctgctaaaaaagtacgcaaaaaggcagaaaacgctcataatacgccgctgcttgtgctatacggttcaaatgcgggaacagctgaaggaacggcgcgtgatttagcagatattgcaatgagcaaaggatttgcaccgcaggtcgcaacgcttgattcacacgccggaaatcttccgcgcgaaggagctgtattaattgtaacggcgtcttataacggtcatccgcctgataacgcaaagcaatttgtcgactggttagaccaagcgtctgctgatgaagtaaaaggcgttcgctactccgtatttggatgcggcgataaaaactgggctgcgacgtatcaaaaagtgcctgcttttatcgatgaaacgcttgccgctaaaggggcagaaaacatcgctgaccgcggtgaagcagatgcaagcgacgactttgaaggcacgtatgaagaatggagtgatcatatgtggagtgacgtagcagcctactttaacctcgacattgaaaacagtgaagataataaatctactctttcacttcaatttgtcgacagcgccgcggatatgccgcttgcgaaaatgcacggtgcgttttcaacgaacgtcgtagcaagcaaagaacttcaacagccaggcagtgcacgaagcacgcgacatcttgaaattgaacttccaaaagaagcttcttatcaagaaggagatcatttaggtgttattcctcgcaactatgaaggaatagtaaaccgtgtaacagcaaggttcggcctaagcgcatcacagcaaatccgtctggaagcagaagaagaaaaattagctcatttgccactcgctaaaacagtatccgtagaagagcttctgcaatacgtggagcttcaagatcctgttacgcgcacgcagcttcgcgcaatggctgctaaaacggtctgcccgccgcataaagtagagcttgaagccttgcttgaaaagcaagcctacaaagaacaagtgctggcaaaacgtttaacaatgcttgaactgcttgaaaaatacccggcgtgtgaaatgaaattcagcgaatttatcgcccttctgccaagcatacgcccgcgctattactcgatttcttcatcacctcgtgtcgatgaaaaacaagcaagcatcacggtcagcgttgtctcaggaccggcgtggagcggatatggagaatataaaggaattgcgtcgaactatcttgccgagctgcaagaaggagatacgattacgtgctttatttccacagatcagtcagaatttacgctgccaaaagaccctgaaacgccgcttatcatggtcggaccgggaacaggcgtcgcgccgtttagaggctttgtgcaggcgcgcaaacagctaaaagaacaaggacagtcacttggagaagcacatttatacttcggctgccgttcacctcatgaagactatctgtatcaagaagagcttgaaaacgcccaaagcgaaggcatcattacgcttcataccgctttttctcgcatgccaaatcagccgaaaacatacgttcagcacgtaatggaacaagacggcaagaaattgattgaacttcttgatcaaggagcgcacttctatatttgcggagacggaagccaaatggcacctgccgttgaagcaacgcttatgaaaagctatgctgacgttcaccaagtgagtgaagcagacgctcgcttatggctgcagcagctagaagaaaaaggccgatacgcaaaagacgtgtgggctggg

SEQ ID NO: 442 - protein, 1049 aa, synthetic construct
  REGION 1..1049: note = Variant of cytochrome P450
MTIKEMPQPKTFGELKNLPLLNTDKPVQALMRIADELGEIFKFEAPGSVTRFLSSQRLIKEACDESRFDKNLSQSLKFARDFLGDGLFTSWTHEPNWKKAHNILGPSFSQRAMKRYHAMMVDIAVQLVQKWERLNADEHIEVSEDMTRLTLDTIGLCGFNYRFNSFYRDQPHPFIVSVVRLLDEVMNKLQRANPDDPAYDENKRQCQEDAKVMNDYVDKIIADRKARGEQSHDLLTQMLNGKDPETGEPLDDGNIRYQIITFLIAGHETTSGLLSFALYFLVKNPHVLQKVAEEAARVLVDPVPSYKQVKQLKYVGMVLNEALRLWPTGPAFSLYAKEDTVLGGEYPLTKGDEVMVLIPQLHRDKTIWGDDVEEFRPERFENPSAIPQHAFKPFGNGQRACIGQQFALHEATLVLGMMLKHFDFEDHTNYELVIKEKLTLKPEGFVVKAKSKGIPLGLIPSPSTEQSAKKVRKKAENAHNTPLLVLYGSNAGTAEGTARDLADIAMSKGFAPQVATLDSHAGNLPREGAVLIVTASYNGHPPDNAKQFVDWLDQASADEVKGVRYSVFGCGDKNWAATYQKVPAFIDETLAAKGAENIADRGEADASDDFEGTYEEWSDHMWSDVAAYFNLDIENSEDNKSTLSLQFVDSAADMPLAKMHGAFSTNVVASKELQQPGSARSTRHLEIELPKEASYQEGDHLGVIPRNYEGIVNRVTARFGLSASQQIRLEAEEEKLAHLPLAKTVSVEELLQYVELQDPVTRTQLRAMAAKTVCPPHKVELEALLEKQAYKEQVLAKRLTMLELLEKYPACEMKFSEFIALLPSIRPRYYSISSSPRVDEKQASITVSVVSGPAWSGYGEYKGIASNYLAELQEGDTITCFISTDQSEFTLPKDPETPLIMVGPGTGVAPFRGFVQARKQLKEQGQSLGEAHLYFGCRSPHEDYLYQEELENAQSEGIITLHTAFSRMPNQPKTYVQHVMEQDGKKLIELLDQGAHFYICGDGSQMAPAVEATLMKSYADVHQVSEADARLWLQQLEEKGRYAKDVWAG

SEQ ID NO: 443 - DNA, 3147 bp, synthetic construct
  misc_feature 1..3147: note = Variant of cytochrome P450
  source 1..3147: mol_type = other DNA
atgacaattaaggaaatgcctcagcctaagacgtttggagaacttaaaaatttaccgttattaaacacagataaaccggttcaagctttgatgcgtattgcggatgaattaggagaaatctttaaattcgaggcgcctggtagcgtaacgcgctttttatcaagtcagcgtctaattaaagaagcatgcgatgaacgtcgctttgataaaaacttaagtcaatcgctgaaatttgcccgtgcttttctgggagacgggttatttacaagctggacgcatgaaccgaattggaaaaaagcgcataatatcttaggcccaagctttagtcagcgtgcaatgaaacgttatcatgcgatgatggtcgatatcgccgtgcagcttgttcaaaagtgggagcgtctaaatgcagatgagcatattgaagtatcggaagacatgacacgtttaacgctggatacaattggtctttgcggcttcaactatcgctttaacagcttttaccgagatcagcctcatccatttattgtgagtgttgtgcgtctgctggatgaagtcatgaacaagctgcagcgagcaaatccagacgacccagcttatgatgaaaacaagcgccagtgtcaagaagatgccaaggtgatgaacgactatgtcgataaaattattgcagatcgcaaagcaaggggtgaacaaagccatgatttattaacgcagatgctaaacggaaaagatccagaaacgggtgagccgcttgatgacgggaacattcgttatcaaattattacattcttaatcgcgggacacgaaacaacaagtggtcttttatcatttgcgctgtatttcttagtgaaaaatccacatgtattacaaaaagtagcagaagaagcagcacgagttctagtagatcctgttccaagctacaaacaagtcaaacagcttaaatatgtcggcatggtcttaaacgaagcgctgcgcttatggccaactggtcctgcgttttccctatatgcaaaagaagatacggtgcttggaggagaatatcctttaaccaaaggcgacgaagtaatggttctgattcctcagcttcaccgtgataaaacaatttggggagacgatgtggaggagttccgtccagagcgttttgaaaatccaagtgcgattccgcagcatgcgtttaaaccgtttggaaacggtcagcgtgcgtgtatcggtcagcagttcgctcttcatgaagcaacgctggtacttggtatgatgctaaaacactttgactttgaagatcatacaaactacgagctcgttattggcgaacgcttaacgttaaaacctgaaggctttgtggtaaaagcaaaatcgaaaggcattccgcttggcggcattccttcacctagcactgaacagtctgctaaaaaagtacgcaaaaaggcagaaaacgctcataatacgccgctgcttgtgctatacggttcaaatgcgggaacagctgaaggaacggcgcgtgatttagcagatattgcaatgagcaaaggatttgcaccgcaggtcgcaacgcttgattcacacgccggaaatcttccgcgcgaaggagctgtattaattgtaacggcgtcttataacggtcatccgcctgataacgcaaagcaatttgtcgactggttagaccaagcgtctgctgatgaagtaaaaggcgttcgctactccgtatttggatgcggcgataaaaactgggctgcgacgtatcaaaaagtgcctgcttttatcgatgaaacgcttgccgctaaaggggcagaaaacatcgctgaccgcggtgaagcagatgcaagcgacgactttgaaggcacgtatgaagaatggagtgatcatatgtggagtgacgtagcagcctactttaacctcgacattgaaaacagtgaagataataaatctactctttcacttcaatttgtcgacagcgccgcggatatgccgcttgcgaaaatgcacggtgcgttttcaacgaacgtcgtagcaagcaaagaacttcaacagccaggcagtgcacgaagcacgcgacatcttgaaattgaacttccaaaagaagcttcttatcaagaaggagatcatttaggtgttattcctcgcaactatgaaggaatagtaaaccgtgtaacagcaaggttcggcctaagcgcatcacagcaaatccgtctggaagcagaagaagaaaaattagctcatttgccactcgctaaaacagtatccgtagaagagcttctgcaatacgtggagcttcaagatcctgttacgcgcacgcagcttcgcgcaatggctgctaaaacggtctgcccgccgcataaagtagagcttgaagccttgcttgaaaagcaagcctacaaagaacaagtgctggcaaaacgtttaacaatgcttgaactgcttgaaaaatacccggcgtgtgaaatgaaattcagcgaatttatcgcccttctgccaagcatacgcccgcgctattactcgatttcttcatcacctcgtgtcgatgaaaaacaagcaagcatcacggtcagcgttgtctcaggaccggcgtggagcggatatggagaatataaaggaattgcgtcgaactatcttgccgagctgcaagaaggagatacgattacgtgctttatttccacagatcagtcagaatttacgctgccaaaagaccctgaaacgccgcttatcatggtcggaccgggaacaggcgtcgcgccgtttagaggctttgtgcaggcgcgcaaacagctaaaagaacaaggacagtcacttggagaagcacatttatacttcggctgccgttcacctcatgaagactatctgtatcaagaagagcttgaaaacgcccaaagcgaaggcatcattacgcttcataccgctttttctcgcatgccaaatcagccgaaaacatacgttcagcacgtaatggaacaagacggcaagaaattgattgaacttcttgatcaaggagcgcacttctatatttgcggagacggaagccaaatggcacctgccgttgaagcaacgcttatgaaaagctatgctgacgttcaccaagtgagtgaagcagacgctcgcttatggctgcagcagctagaagaaaaaggccgatacgcaaaagacgtgtgggctggg

SEQ ID NO: 444 - protein, 1049 aa, synthetic construct
  REGION 1..1049: note = Variant of cytochrome P450
MTIKEMPQPKTFGELKNLPLLNTDKPVQALMRIADELGEIFKFEAPGSVTRFLSSQRLIKEACDERRFDKNLSQSLKFARAFLGDGLFTSWTHEPNWKKAHNILGPSFSQRAMKRYHAMMVDIAVQLVQKWERLNADEHIEVSEDMTRLTLDTIGLCGFNYRFNSFYRDQPHPFIVSVVRLLDEVMNKLQRANPDDPAYDENKRQCQEDAKVMNDYVDKIIADRKARGEQSHDLLTQMLNGKDPETGEPLDDGNIRYQIITFLIAGHETTSGLLSFALYFLVKNPHVLQKVAEEAARVLVDPVPSYKQVKQLKYVGMVLNEALRLWPTGPAFSLYAKEDTVLGGEYPLTKGDEVMVLIPQLHRDKTIWGDDVEEFRPERFENPSAIPQHAFKPFGNGQRACIGQQFALHEATLVLGMMLKHFDFEDHTNYELVIGERLTLKPEGFVVKAKSKGIPLGGIPSPSTEQSAKKVRKKAENAHNTPLLVLYGSNAGTAEGTARDLADIAMSKGFAPQVATLDSHAGNLPREGAVLIVTASYNGHPPDNAKQFVDWLDQASADEVKGVRYSVFGCGDKNWAATYQKVPAFIDETLAAKGAENIADRGEADASDDFEGTYEEWSDHMWSDVAAYFNLDIENSEDNKSTLSLQFVDSAADMPLAKMHGAFSTNVVASKELQQPGSARSTRHLEIELPKEASYQEGDHLGVIPRNYEGIVNRVTARFGLSASQQIRLEAEEEKLAHLPLAKTVSVEELLQYVELQDPVTRTQLRAMAAKTVCPPHKVELEALLEKQAYKEQVLAKRLTMLELLEKYPACEMKFSEFIALLPSIRPRYYSISSSPRVDEKQASITVSVVSGPAWSGYGEYKGIASNYLAELQEGDTITCFISTDQSEFTLPKDPETPLIMVGPGTGVAPFRGFVQARKQLKEQGQSLGEAHLYFGCRSPHEDYLYQEELENAQSEGIITLHTAFSRMPNQPKTYVQHVMEQDGKKLIELLDQGAHFYICGDGSQMAPAVEATLMKSYADVHQVSEADARLWLQQLEEKGRYAKDVWAG

SEQ ID NO: 445 - DNA, 3147 bp, synthetic construct
  misc_feature 1..3147: note = Variant of cytochrome P450
  source 1..3147: mol_type = other DNA
atgacaattaaggaaatgcctcagcctaagacgtttggagaacttaaaaatttaccgttattaaacacagataaaccggttcaagctttgatgcgtattgcggatgaattaggagaaatctttaaattcgaggcgcctggtagcgtaacgcgctttttatcaagtcagcgtctaattaaagaagcatgcgatgaacgtcgctttgataaaaacttaagtcaatcgctgaaatttggccgtgattttctgggagacgggttattcacaagctggacgcatgaaccgaattggaaaaaagcgcataatatcttaggcccaagctttagtcagcgtgcaatgaaacgttatcatgcgatgatggtcgatatcgccgtgcagcttgttcaaaagtgggagcgtctaaatgcagatgagcatattgaagtatcggaagacatgacacgtttaacgctggatacaattggtctttgcggcttcaactatcgctttaacagcttttaccgagatcagcctcatccatttattgtgagtgttgtgcgtgcactggatgaagtaatgaacaagctgcagcgagcaaatccagacgacccagcttatgatgaaaacaagcgccagtgtcaagaagatattaaggtgatgaacgactatgtcgataaaattattgcagatcgcaaagcaaggggtgaacaaagccatgatttattaacgcagatgctaaacggaaaagatccagaaacgggtgagccgcttgatgacgggaacattcgttatcaaattattacattcttaatcgcgggacacgaaacaacaagtggtcttttatcatttgcgctgtatttcttagtgaaaaatccacatgtattacaaaaagtagcagaagaagcagcacgagttctagtagatcctgttccaagctacaaacaagtcaaacagcttaaatatgtcggcatggtcttaaacgaagcgctgcgcttatggccaactggtcctgcgttttccctatatgcaaaagaagatacggtgcttggaggagaatatcctttaaccaaaggcgacgaagtaatggttctgattcctcagcttcaccgtgataaaacaatttggggagacgatgtggaggagttccgtccagagcgttttgaaaatccaagtgcgattccgcagcatgcgtttaaaccgtttggaaacggtcagcgtgcgtgtatcggtcagcagttcgctcttcatgaagcaacgctggtacttggtatgatgctaaaacactttgactttgaagatcatacaaactacgagctcgttattggcgaacgcttaacgttaaaacctgaaggctttgtggtaaaagcaaaatcgaaaggcattccgcttggcctgattccttcacctagcactgaacagtctgctaaaaaagtacgcaaaaaggcagaaaacgctcataatacgccgctgcttgtgctatacggttcaaatgcgggaacagctgaaggaacggcgcgtgatttagcagatattgcaatgagcaaaggatttgcaccgcaggtcgcaacgcttgattcacacgccggaaatcttccgcgcgaaggagctgtattaattgtaacggcgtcttataacggtcatccgcctgataacgcaaagcaatttgtcgactggttagaccaagcgtctgctgatgaagtaaaaggcgttcgctactccgtatttggatgcggcgataaaaactgggctgcgacgtatcaaaaagtgcctgcttttatcgatgaaacgcttgccgctaaaggggcagaaaacatcgctgaccgcggtgaagcagatgcaagcgacgactttgaaggcacgtatgaagaatggagtgatcatatgtggagtgacgtagcagcctactttaacctcgacattgaaaacagtgaagataataaatctactctttcacttcaatttgtcgacagcgccgcggatatgccgcttgcgaaaatgcacggtgcgttttcaacgaacgtcgtagcaagcaaagaacttcaacagccaggcagtgcacgaagcacgcgacatcttgaaattgaacttccaaaagaagcttcttatcaagaaggagatcatttaggtgttattcctcgcaactatgaaggaatagtaaaccgtgtaacagcaaggttcggcctaagcgcatcacagcaaatccgtctggaagcagaagaagaaaaattagctcatttgccactcgctaaaacagtatccgtagaagagcttctgcaatacgtggagcttcaagatcctgttacgcgcacgcagcttcgcgcaatggctgctaaaacggtctgcccgccgcataaagtagagcttgaagccttgcttgaaaagcaagcctacaaagaacaagtgctggcaaaacgtttaacaatgcttgaactgcttgaaaaatacccggcgtgtgaaatgaaattcagcgaatttatcgcccttctgccaagcatacgcccgcgctattactcgatttcttcatcacctcgtgtcgatgaaaaacaagcaagcatcacggtcagcgttgtctcaggaccggcgtggagcggatatggagaatataaaggaattgcgtcgaactatcttgccgagctgcaagaaggagatacgattacgtgctttatttccacagatcagtcagaatttacgctgccaaaagaccctgaaacgccgcttatcatggtcggaccgggaacaggcgtcgcgccgtttagaggctttgtgcaggcgcgcaaacagctaaaagaacaaggacagtcacttggagaagcacatttatacttcggctgccgttcacctcatgaagactatctgtatcaagaagagcttgaaaacgcccaaagcgaaggcatcattacgcttcataccgctttttctcgcatgccaaatcagccgaaaacatacgttcagcacgtaatggaacaagacggcaagaaattgattgaacttcttgatcaaggagcgcacttctatatttgcggagacggaagccaaatggcacctgccgttgaagcaacgcttatgaaaagctatgctgacgttcaccaagtgagtgaagcagacgctcgcttatggctgcagcagctagaagaaaaaggccgatacgcaaaagacgtgtgggctggg

SEQ ID NO: 446 - protein, 1049 aa, synthetic construct
  REGION 1..1049: note = Variant of cytochrome P450
MTIKEMPQPKTFGELKNLPLLNTDKPVQALMRIADELGEIFKFEAPGSVTRFLSSQRLIKEACDERRFDKNLSQSLKFGRDFLGDGLFTSWTHEPNWKKAHNILGPSFSQRAMKRYHAMMVDIAVQLVQKWERLNADEHIEVSEDMTRLTLDTIGLCGFNYRFNSFYRDQPHPFIVSVVRALDEVMNKLQRANPDDPAYDENKRQCQEDIKVMNDYVDKIIADRKARGEQSHDLLTQMLNGKDPETGEPLDDGNIRYQIITFLIAGHETTSGLLSFALYFLVKNPHVLQKVAEEAARVLVDPVPSYKQVKQLKYVGMVLNEALRLWPTGPAFSLYAKEDTVLGGEYPLTKGDEVMVLIPQLHRDKTIWGDDVEEFRPERFENPSAIPQHAFKPFGNGQRACIGQQFALHEATLVLGMMLKHFDFEDHTNYELVIGERLTLKPEGFVVKAKSKGIPLGLIPSPSTEQSAKKVRKKAENAHNTPLLVLYGSNAGTAEGTARDLADIAMSKGFAPQVATLDSHAGNLPREGAVLIVTASYNGHPPDNAKQFVDWLDQASADEVKGVRYSVFGCGDKNWAATYQKVPAFIDETLAAKGAENIADRGEADASDDFEGTYEEWSDHMWSDVAAYFNLDIENSEDNKSTLSLQFVDSAADMPLAKMHGAFSTNVVASKELQQPGSARSTRHLEIELPKEASYQEGDHLGVIPRNYEGIVNRVTARFGLSASQQIRLEAEEEKLAHLPLAKTVSVEELLQYVELQDPVTRTQLRAMAAKTVCPPHKVELEALLEKQAYKEQVLAKRLTMLELLEKYPACEMKFSEFIALLPSIRPRYYSISSSPRVDEKQASITVSVVSGPAWSGYGEYKGIASNYLAELQEGDTITCFISTDQSEFTLPKDPETPLIMVGPGTGVAPFRGFVQARKQLKEQGQSLGEAHLYFGCRSPHEDYLYQEELENAQSEGIITLHTAFSRMPNQPKTYVQHVMEQDGKKLIELLDQGAHFYICGDGSQMAPAVEATLMKSYADVHQVSEADARLWLQQLEEKGRYAKDVWAG

SEQ ID NO: 447 - DNA, 3147 bp, synthetic construct
  misc_feature 1..3147: note = Variant of cytochrome P450
  source 1..3147: mol_type = other DNA
atgacaattaaggaaatgcctcagcctaagacgtttggagaacttaaaaatttaccgttattaaacacagataaaccggttcaagctttgatgcgtattgcggatgaattaggagaaatctttaaattcgaggcgcctggtagcgtaacgcgctttttatcaagtcagcgtctaattaaagaagcatgcgatgaatcacgctttgataaaaacttaagtcaatcgctgaaatttggccgtgattttctgggagacgggttatttacaagctggacgcatgaaccgaattggaaaaaagcgcataatatcttaggcccaagctttagtcagcgtgcaatgaaacgttatcatgcgatgatggtcgatatcgccgtgcagcttgttcaaaagtgggagcgtctaaatgcagatgagcatattgaagtatcggaagacatgacacgtttaacgctggatacaattggtctttgcggcttcaactatcgctttaacagcttttaccgagatcagcctcatccatttattgtgtcggcagtgcgtgcactggatgaagtaatgaacaagctgcagcgagcaaatccagacgacccagcttatgatgaaaacaagcgccagtgtcaagaagatatcaaggtgatgaacgactatgtcgataaaattattgcagatcgcaaagcaaggggtgaacaaagccatgatttattaacgcagatgctaaacggaaaagatccagaaacgggtgagccgcttgatgacgggaacattcgttatcaaattattacattcttaatcgcgggacacgaaacaacaagtggtcttttatcatttgcgctgtatttcttagtgaaaaatccacatgtattacaaaaagtagcagaagaagcagcacgagttctagtagatcctgttccaagctacaaacaagtcaaacagcttaaatatgtcggcatggtcttaaacgaagcgctgcgcttatggccaactggtcctgcgttttccctatatgcaaaagaagatacggtgcttggaggagaatatcctttaaccaaaggcgacgaagtaatggttctgattcctcagcttcaccgtgataaaacaatttggggagacgatgtggaggagttccgtccagagcgttttgaaaatccaagtgcgattccgcagcatgcgtttaaaccgtttggaaacggtcagcgtgcgtgtatcggtcagcagttcgctcttcatgaagcaacgctggtacttggtatgatgctaaaacactttgactttgaagatcatacaaactacgagctcgttattaaggaacgcttaacgttaaaacctgaaggctttgtggtaaaagcaaaatcgaaaggcattccgcttggcctgattccttcacctagcactgaacagtctgctaaaaaagtacgcaaaaaggcagaaaacgctcataatacgccgctgcttgtgctatacggttcaaatgcgggaacagctgaaggaacggcgcgtgatttagcagatattgcaatgagcaaaggatttgcaccgcaggtcgcaacgcttgattcacacgccggaaatcttccgcgcgaaggagctgtattaattgtaacggcgtcttataacggtcatccgcctgataacgcaaagcaatttgtcgactggttagaccaagcgtctgctgatgaagtaaaaggcgttcgctactccgtatttggatgcggcgataaaaactgggctgcgacgtatcaaaaagtgcctgcttttatcgatgaaacgcttgccgctaaaggggcagaaaacatcgctgaccgcggtgaagcagatgcaagcgacgactttgaaggcacgtatgaagaatggagtgatcatatgtggagtgacgtagcagcctactttaacctcgacattgaaaacagtgaagataataaatctactctttcacttcaatttgtcgacagcgccgcggatatgccgcttgcgaaaatgcacggtgcgttttcaacgaacgtcgtagcaagcaaagaacttcaacagccaggcagtgcacgaagcacgcgacatcttgaaattgaacttccaaaagaagcttcttatcaagaaggagatcatttaggtgttattcctcgcaactatgaaggaatagtaaaccgtgtaacagcaaggttcggcctaagcgcatcacagcaaatccgtctggaagcagaagaagaaaaattagctcatttgccactcgctaaaacagtatccgtagaagagcttctgcaatacgtggagcttcaagatcctgttacgcgcacgcagcttcgcgcaatggctgctaaaacggtctgcccgccgcataaagtagagcttgaagccttgcttgaaaagcaagcctacaaagaacaagtgctggcaaaacgtttaacaatgcttgaactgcttgaaaaatacccggcgtgtgaaatgaaattcagcgaatttatcgcccttctgccaagcatacgcccgcgctattactcgatttcttcatcacctcgtgtcgatgaaaaacaagcaagcatcacggtcagcgttgtctcaggaccggcgtggagcggatatggagaatataaaggaattgcgtcgaactatcttgccgagctgcaagaaggagatacgattacgtgctttatttccacagatcagtcagaatttacgctgccaaaagaccctgaaacgccgcttatcatggtcggaccgggaacaggcgtcgcgccgtttagaggctttgtgcaggcgcgcaaacagctaaaagaacaaggacagtcacttggagaagcacatttatacttcggctgccgttcacctcatgaagactatctgtatcaagaagagcttgaaaacgcccaaagcgaaggcatcattacgcttcataccgctttttctcgcatgccaaatcagccgaaaacatacgttcagcacgtaatggaacaagacggcaagaaattgattgaacttcttgatcaaggagcgcacttctatatttgcggagacggaagccaaatggcacctgccgttgaagcaacgcttatgaaaagctatgctgacgttcaccaagtgagtgaagcagacgctcgcttatggctgcagcagctagaagaaaaaggccgatacgcaaaagacgtgtgggctggg

SEQ ID NO: 448 - protein, 1049 aa, synthetic construct
  REGION 1..1049: note = Variant of cytochrome P450
MTIKEMPQPKTFGELKNLPLLNTDKPVQALMRIADELGEIFKFEAPGSVTRFLSSQRLIKEACDESRFDKNLSQSLKFGRDFLGDGLFTSWTHEPNWKKAHNILGPSFSQRAMKRYHAMMVDIAVQLVQKWERLNADEHIEVSEDMTRLTLDTIGLCGFNYRFNSFYRDQPHPFIVSAVRALDEVMNKLQRANPDDPAYDENKRQCQEDIKVMNDYVDKIIADRKARGEQSHDLLTQMLNGKDPETGEPLDDGNIRYQIITFLIAGHETTSGLLSFALYFLVKNPHVLQKVAEEAARVLVDPVPSYKQVKQLKYVGMVLNEALRLWPTGPAFSLYAKEDTVLGGEYPLTKGDEVMVLIPQLHRDKTIWGDDVEEFRPERFENPSAIPQHAFKPFGNGQRACIGQQFALHEATLVLGMMLKHFDFEDHTNYELVIKERLTLKPEGFVVKAKSKGIPLGLIPSPSTEQSAKKVRKKAENAHNTPLLVLYGSNAGTAEGTARDLADIAMSKGFAPQVATLDSHAGNLPREGAVLIVTASYNGHPPDNAKQFVDWLDQASADEVKGVRYSVFGCGDKNWAATYQKVPAFIDETLAAKGAENIADRGEADASDDFEGTYEEWSDHMWSDVAAYFNLDIENSEDNKSTLSLQFVDSAADMPLAKMHGAFSTNVVASKELQQPGSARSTRHLEIELPKEASYQEGDHLGVIPRNYEGIVNRVTARFGLSASQQIRLEAEEEKLAHLPLAKTVSVEELLQYVELQDPVTRTQLRAMAAKTVCPPHKVELEALLEKQAYKEQVLAKRLTMLELLEKYPACEMKFSEFIALLPSIRPRYYSISSSPRVDEKQASITVSVVSGPAWSGYGEYKGIASNYLAELQEGDTITCFISTDQSEFTLPKDPETPLIMVGPGTGVAPFRGFVQARKQLKEQGQSLGEAHLYFGCRSPHEDYLYQEELENAQSEGIITLHTAFSRMPNQPKTYVQHVMEQDGKKLIELLDQGAHFYICGDGSQMAPAVEATLMKSYADVHQVSEADARLWLQQLEEKGRYAKDVWAG

SEQ ID NO: 449 - DNA, 3147 bp, synthetic construct
  misc_feature 1..3147: note = Variant of cytochrome P450
  source 1..3147: mol_type = other DNA
atgacaattaaggaaatgcctcagcctaagacgtttggagaacttaaaaatttaccgttattaaacacagataaaccggttcaagctttgatgcgtattgcggatgaattaggagaaatctttaaattcgaggcgcctggtagcgtaacgcgctttttatcaagtcagcgtctaattaaagaagcatgcgatgaaagtcgctttgataaaaacttaagtcaatcgctgaaatttggccgtgattttctgggagacgggttattcacaagctggacgcatgaactgaattggaaaaaagcgcataatatcttaggcccaagctttagtcagcgtgcaatgaaacgttatcatgcgatgatggtcgatatcgccgtgcagcttgttcaaaagtgggagcgtctaaatgcagatgagcatattgaagtatcggaagacatgacacgtttaacgctggatacaattggtctttgcggcttcaactatcgctttaacagcttttaccgagatcagcctcatccatttattgtggcggtagtgcgtgcactggatgaagtaatgaacaagctgcagcgagcaaatccagacgacccagcttatgatgaaaacaagcgccagtgtcaagaagatatcaaggtgatgaacgactatgtcgataaaattattgcagatcgcaaagcaaggggtgaacaaagccatgatttattaacgcagatgctaaacggaaaagatccagaaacgggtgagccgcttgatgacgggaacattcgttatcaaattattacattcttaatcgcgggacacgaaacaacaagtggtcttttatcatttgcgctgtatttcttagtgaaaaatccacatgtattacaaaaagtagcagaagaagcagcacgagttctagtagatcctgttccaagctacaaacaagtcaaacagcttaaatatgtcggcatggtcttaaacgaagcgctgcgcttatggccaactggtcctgcgttttccctatatgcaaaagaagatacggtgcttggaggagaatatcctttaaccaaaggcgacgaagtaatggttctgattcctcagcttcaccgtgataaaacaatttggggagacgatgtggaggagttccgtccagagcgttttgaaaatccaagtgcgattccgcagcatgcgtttaaaccgtttggaaacggtcagcgtgcgtgtatcggtcagcagttcgctcttcatgaagcaacgctggtacttggtatgatgctaaaacactttgactttgaagatcatacaaactacgagctcgttattaaggaacgcttaacgttaaaacctgaaggctttgtggtaaaagcaaaatcgaaaggcattccgcttggcggcattccttcacctagcactgaacagtctgctaaaaaagtacgcaaaaaggcagaaaacgctcataatacgccgctgcttgtgctatacggttcaaatgcgggaacagctgaaggaacggcgcgtgatttagcagatattgcaatgagcaaaggatttgcaccgcaggtcgcaacgcttgattcacacgccggaaatcttccgcgcgaaggagctgtattaattgtaacggcgtcttataacggtcatccgcctgataacgcaaagcaatttgtcgactggttagaccaagcgtctgctgatgaagtaaaaggcgttcgctactccgtatttggatgcggcgataaaaactgggctgcgacgtatcaaaaagtgcctgcttttatcgatgaaacgcttgccgctaaaggggcagaaaacatcgctgaccgcggtgaagcagatgcaagcgacgactttgaaggcacgtatgaagaatggagtgatcatatgtggagtgacgtagcagcctactttaacctcgacattgaaaacagtgaagataataaatctactctttcacttcaatttgtcgacagcgccgcggatatgccgcttgcgaaaatgcacggtgcgttttcaacgaacgtcgtagcaagcaaagaacttcaacagccaggcagtgcacgaagcacgcgacatcttgaaattgaacttccaaaagaagcttcttatcaagaaggagatcatttaggtgttattcctcgcaactatgaaggaatagtaaaccgtgtaacagcaaggttcggcctaagcgcatcacagcaaatccgtctggaagcagaagaagaaaaattagctcatttgccactcgctaaaacagtatccgtagaagagcttctgcaatacgtggagcttcaagatcctgttacgcgcacgcagcttcgcgcaatggctgctaaaacggtctgcccgccgcataaagtagagcttgaagccttgcttgaaaagcaagcctacaaagaacaagtgctggcaaaacgtttaacaatgcttgaactgcttgaaaaatacccggcgtgtgaaatgaaattcagcgaatttatcgcccttctgccaagcatacgcccgcgctattactcgatttcttcatcacctcgtgtcgatgaaaaacaagcaagcatcacggtcagcgttgtctcaggaccggcgtggagcggatatggagaatataaaggaattgcgtcgaactatcttgccgagctgcaagaaggagatacgattacgtgctttatttccacagatcagtcagaatttacgctgccaaaagaccctgaaacgccgcttatcatggtcggaccgggaacaggcgtcgcgccgtttagaggctttgtgcaggcgcgcaaacagctaaaagaacaaggacagtcacttggagaagcacatttatacttcggctgccgttcacctcatgaagactatctgtatcaagaagagcttgaaaacgcccaaagcgaaggcatcattacgcttcataccgctttttctcgcatgccaaatcagccgaaaacatacgttcagcacgtaatggaacaagacggcaagaaattgattgaacttcttgatcaaggagcgcacttctatatttgcggagacggaagccaaatggcacctgccgttgaagcaacgcttatgaaaagctatgctgacgttcaccaagtgagtgaagcagacgctcgcttatggctgcagcagctagaagaaaaaggccgatacgcaaaagacgtgtgggctggg

SEQ ID NO: 450 - protein, 1049 aa, synthetic construct
  REGION 1..1049: note = Variant of cytochrome P450
MTIKEMPQPKTFGELKNLPLLNTDKPVQALMRIADELGEIFKFEAPGSVTRFLSSQRLIKEACDESRFDKNLSQSLKFGRDFLGDGLFTSWTHELNWKKAHNILGPSFSQRAMKRYHAMMVDIAVQLVQKWERLNADEHIEVSEDMTRLTLDTIGLCGFNYRFNSFYRDQPHPFIVAVVRALDEVMNKLQRANPDDPAYDENKRQCQEDIKVMNDYVDKIIADRKARGEQSHDLLTQMLNGKDPETGEPLDDGNIRYQIITFLIAGHETTSGLLSFALYFLVKNPHVLQKVAEEAARVLVDPVPSYKQVKQLKYVGMVLNEALRLWPTGPAFSLYAKEDTVLGGEYPLTKGDEVMVLIPQLHRDKTIWGDDVEEFRPERFENPSAIPQHAFKPFGNGQRACIGQQFALHEATLVLGMMLKHFDFEDHTNYELVIKERLTLKPEGFVVKAKSKGIPLGGIPSPSTEQSAKKVRKKAENAHNTPLLVLYGSNAGTAEGTARDLADIAMSKGFAPQVATLDSHAGNLPREGAVLIVTASYNGHPPDNAKQFVDWLDQASADEVKGVRYSVFGCGDKNWAATYQKVPAFIDETLAAKGAENIADRGEADASDDFEGTYEEWSDHMWSDVAAYFNLDIENSEDNKSTLSLQFVDSAADMPLAKMHGAFSTNVVASKELQQPGSARSTRHLEIELPKEASYQEGDHLGVIPRNYEGIVNRVTARFGLSASQQIRLEAEEEKLAHLPLAKTVSVEELLQYVELQDPVTRTQLRAMAAKTVCPPHKVELEALLEKQAYKEQVLAKRLTMLELLEKYPACEMKFSEFIALLPSIRPRYYSISSSPRVDEKQASITVSVVSGPAWSGYGEYKGIASNYLAELQEGDTITCFISTDQSEFTLPKDPETPLIMVGPGTGVAPFRGFVQARKQLKEQGQSLGEAHLYFGCRSPHEDYLYQEELENAQSEGIITLHTAFSRMPNQPKTYVQHVMEQDGKKLIELLDQGAHFYICGDGSQMAPAVEATLMKSYADVHQVSEADARLWLQQLEEKGRYAKDVWAG

SEQ ID NO: 451 - DNA, 3147 bp, synthetic construct
  misc_feature 1..3147: note = Variant of cytochrome P450
  source 1..3147: mol_type = other DNA
atgacaattaaggaaatgcctcagcctaagacgtttggagaacttaaaaatttaccgttattaaacacagataaaccggttcaagctttgatgcgtattgcggatgaattaggagaaatctttaaattcgaggcgcctggtagcgtaacgcgctttttatcaagtcagcgtctaattaaagaagcatgcgatgaatcacgctttgataaaaacttaagtcaatcgctgaaatttgcccgtgattttctgggagacgggttatttacaagctggacgcatgaaccgaattggaaaaaagcgcataatatcttaggcccaagctttagtcagcgtgcaatgaaacgttatcatgcgatgatggtcgatatcgccgtgcagcttgttcaaaagtgggagcgtctaaatgcagatgagcatattgaagtatcggaagacatgacacgtttaacgctggatacaattggtctttgcggcttcaactatcgctttaacagcttttaccgagatcagcctcatccatttattgtgagtgttgtgcgtctgctggatgaagtcatgaacaagctgcagcgagcaaatccagacgacccagcttatgatgaaaacaagcgccagtgtcaagaagctattaaggtgatgaacgactatgtcgataaaattattgcagatcgcaaagcaaggggtgaacaaagccatgatttattaacgcagatgctaaacggaaaagatccagaaacgggtgagccgcttgatgacgggaacattcgttatcaaattattacattcttaatcgcgggacacgaaacaacaagtggtcttttatcatttgcgctgtatttcttagtgaaaaatccacatgtattacaaaaagtagcagaagaagcagcacgagttctagtagatcctgttccaagctacaaacaagtcaaacagcttaaatatgtcggcatggtcttaaacgaagcgctgcgcttatggccaactggtcctgcgttttccctatatgcaaaagaagatacggtgcttggaggagaatatcctttaaccaaaggcgacgaagtaatggttctgattcctcagcttcaccgtgataaaacaatttggggagacgatgtggaggagttccgtccagagcgttttgaaaatccaagtgcgattccgcagcatgcgtttaaaccgtttggaaacggtcagcgtgcgtgtatcggtcagcagttcgctcttcatgaagcaacgctggtacttggtatgatgctaaaacactttgactttgaagatcatacaaactacgagctcgttattaaagaaaagttaacgttaaaacctgaaggctttgtggtaaaagcaaaatcgaaaggcattccgcttggcctgattccttcacctagcactgaacagtctgctaaaaaagtacgcaaaaaggcagaaaacgctcataatacgccgctgcttgtgctatacggttcaaatgcgggaacagctgaaggaacggcgcgtgatttagcagatattgcaatgagcaaaggatttgcaccgcaggtcgcaacgcttgattcacacgccggaaatcttccgcgcgaaggagctgtattaattgtaacggcgtcttataacggtcatccgcctgataacgcaaagcaatttgtcgactggttagaccaagcgtctgctgatgaagtaaaaggcgttcgctactccgtatttggatgcggcgataaaaactgggctgcgacgtatcaaaaagtgcctgcttttatcgatgaaacgcttgccgctaaaggggcagaaaacatcgctgaccgcggtgaagcagatgcaagcgacgactttgaaggcgcgtatgaagaatggagtgatcatatgtggagtgacgtagcagcctactttaacctcgacattgaaaacagtgaagataataaatctactctttcacttcaatttgtcgacagcgccgcggatatgccgcttgcgaaaatgcacggtgcgttttcaacgaacgtcgtagcaagcaaagaacttcaacagccaggcagtgcacgaagcacgcgacatcttgaaattgaacttccaaaagaagcttcttatcaagaaggagatcatttaggtgttattcctcgcaactatgaaggaatagtaaaccgtgtaacagcaaggttcggcctaagcgcatcacagcaaatccgtctggaagcagaagaagaaaaattagctcatttgccactcgctaaaacagtatccgtagaagagcttctgcaatacgtggagcttcaagatcctgttacgcgcacgcagcttcgcgcaatggctgctaaaacggtctgcccgccgcataaagtagagcttgaagccttgcttgaaaagcaagcctacaaagaacaagtgctggcaaaacgtttaacaatgcttgaactgcttgaaaaatacccggcgtgtgaaatgaaattcagcgaatttatcgcccttctgccaagcatacgcccgcgctattactcgatttcttcatcacctcgtgtcgatgaaaaacaagcaagcatcacggtcagcgttgtctcaggaccggcgtggagcggatatggagaatataaaggaattgcgtcgaactatcttgccgagctgcaagaaggagatacgattacgtgctttatttccacagatcagtcagaatttacgctgccaaaagaccctgaaacgccgcttatcatggtcggaccgggaacaggcgtcgcgccgtttagaggctttgtgcaggcgcgcaaacagctaaaagaacaaggacagtcacttggagaagcacatttatacttcggctgccgttcacctcatgaagactatctgtatcaagaagagcttgaaaacgcccaaagcgaaggcatcattacgcttcataccgctttttctcgcatgccaaatcagccgaaaacatacgttcagcacgtaatggaacaagacggcaagaaattgattgaacttcttgatcaaggagcgcacttctatatttgcggagacggaagccaaatggcacctgccgttgaagcaacgcttatgaaaagctatgctgacgttcaccaagtgagtgaagcagacgctcgcttatggctgcagcagctagaagaaaaaggccgatacgcaaaagacgtgtgggctggg

SEQ ID NO: 452 - protein, 1049 aa, synthetic construct
  REGION 1..1049: note = Variant of cytochrome P450
MTIKEMPQPKTFGELKNLPLLNTDKPVQALMRIADELGEIFKFEAPGSVTRFLSSQRLIKEACDESRFDKNLSQSLKFARDFLGDGLFTSWTHEPNWKKAHNILGPSFSQRAMKRYHAMMVDIAVQLVQKWERLNADEHIEVSEDMTRLTLDTIGLCGFNYRFNSFYRDQPHPFIVSVVRLLDEVMNKLQRANPDDPAYDENKRQCQEAIKVMNDYVDKIIADRKARGEQSHDLLTQMLNGKDPETGEPLDDGNIRYQIITFLIAGHETTSGLLSFALYFLVKNPHVLQKVAEEAARVLVDPVPSYKQVKQLKYVGMVLNEALRLWPTGPAFSLYAKEDTVLGGEYPLTKGDEVMVLIPQLHRDKTIWGDDVEEFRPERFENPSAIPQHAFKPFGNGQRACIGQQFALHEATLVLGMMLKHFDFEDHTNYELVIKEKLTLKPEGFVVKAKSKGIPLGLIPSPSTEQSAKKVRKKAENAHNTPLLVLYGSNAGTAEGTARDLADIAMSKGFAPQVATLDSHAGNLPREGAVLIVTASYNGHPPDNAKQFVDWLDQASADEVKGVRYSVFGCGDKNWAATYQKVPAFIDETLAAKGAENIADRGEADASDDFEGAYEEWSDHMWSDVAAYFNLDIENSEDNKSTLSLQFVDSAADMPLAKMHGAFSTNVVASKELQQPGSARSTRHLEIELPKEASYQEGDHLGVIPRNYEGIVNRVTARFGLSASQQIRLEAEEEKLAHLPLAKTVSVEELLQYVELQDPVTRTQLRAMAAKTVCPPHKVELEALLEKQAYKEQVLAKRLTMLELLEKYPACEMKFSEFIALLPSIRPRYYSISSSPRVDEKQASITVSVVSGPAWSGYGEYKGIASNYLAELQEGDTITCFISTDQSEFTLPKDPETPLIMVGPGTGVAPFRGFVQARKQLKEQGQSLGEAHLYFGCRSPHEDYLYQEELENAQSEGIITLHTAFSRMPNQPKTYVQHVMEQDGKKLIELLDQGAHFYICGDGSQMAPAVEATLMKSYADVHQVSEADARLWLQQLEEKGRYAKDVWAG

SEQ ID NO: 453 - DNA, 3147 bp, synthetic construct
  misc_feature 1..3147: note = Variant of cytochrome P450
  source 1..3147: mol_type = other DNA
atgacaattaaggaaatgcctcagcctaagacgtttggagaacttaaaaatttaccgttattaaacacagataaaccggttcaagctttgatgcgtattgcggatgaattaggagaaatctttaaattcgaggcgcctggtagcgtaacgcgctttttatcaagtcagcgtctaattaaagaagcatgcgatgaatcacgctttgataaaaacttaagtcaatcgctgaaatttgggcgtgattttctgggagacgggttatttacaagctggacgcatgaaccgaattggaaaaaagcgcataatatcttaggcccaagctttagtcagcgtgcaatgaaacgttatcatgcgatgatggtcgatatcgccgtgcagcttgttcaaaagtgggagcgtctaaatgcagatgagcatattgaagtatcggaagacatgacacgtttaacgctggatacaattggtctttgcggcttcaactatcgctttaacagcttttaccgagatcagcctcatccatttattgtggcggtagtgcgtgcactggatgaagtaatgaacaagctgcagcgagcaaatccagacgacccagcttatgatgaaaacaagcgccagtgtcaagaagatatcaaggtgatgaacgactatgtcgataaaattattgcagatcgcaaagcaaggggtgaacaaagccatgatttattaacgcagatgctaaacggaaaagatccagaaacgggtgagccgcttgatgacgggaacattcgttatcaaattattacattcttaatcgcgggacacgaaacaacaagtggtcttttatcatttgcgctgtatttcttagtgaaaaatccacatgtattacaaaaagtagcagaagaagcagcacgagttctagtagatcctgttccaagctacaaacaagtcaaacagcttaaatatgtcggcatggtcttaaacgaagcgctgcgcttatggccaactggtcctgcgttttccctatatgcaaaagaagatacggtgcttggaggagaatatcctttaaccaaaggcgacgaagtaatggttctgattcctcagcttcaccgtgataaaacaatttggggagacgatgtggaggagttccgtccagagcgttttgaaaatccaagtgcgattccgcagcatgcgtttaaaccgtttggaaacggtcagcgtgcgtgtatcggtcagcagttcgctcttcatgaagcaacgctggtacttggtatgatgctaaaacactttgactttgaagatcatacaaactacgagctcgttattaaggaacgcttaacgttaaaacctgaaggctttgtggtaaaagcaaaatcgaaaggcattccgcttggcggcattccttcacctagcactgaacagtctgctaaaaaagtacgcaaaaaggcagaaaacgctcataatacgccgctgcttgtgctatacggttcaaatgcgggaacagctgaaggaacggcgcgtgatttagcagatattgcaatgagcaaaggatttgcaccgcaggtcgcaacgcttgattcacacgccggaaatcttccgcgcgaaggagctgtattaattgtaacggcgtcttataacggtcatccgcctgataacgcaaagcaatttgtcgactggttagaccaagcgtctgctgatgaagtaaaaggcgttcgctactccgtatttggatgcggcgataaaaactgggctgcgacgtatcaaaaagtgcctgcttttatcgatgaaacgcttgccgctaaaggggcagaaaacatcgctgaccgcggtgaagcagatgcaagcgacgactttgaaggcacatatgaagaatggagtgatcatatgtggagtgacgtagcagcctactttaacctcgacattgaaaacagtgaagataataaatctactctttcacttcaatttgtcgacagcgccgcggatatgccgcttgcgaaaatgcacggtgcgttttcaacgaacgtcgtagcaagcaaagaacttcaacagccaggcagtgcacgaagcacgcgacatcttgaaattgaacttccaaaagaagcttcttatcaagaaggagatcatttaggtgttattcctcgcaactatgaaggaatagtaaaccgtgtaacagcaaggttcggcctaagcgcatcacagcaaatccgtctggaagcagaagaagaaaaattagctcatttgccactcgctaaaacagtatccgtagaagagcttctgcaatacgtggagcttcaagatcctgttacgcgcacgcagcttcgcgcaatggctgctaaaacggtctgcccgccgcataaagtagagcttgaagccttgcttgaaaagcaagcctacaaagaacaagtgctggcaaaacgtttaacaatgcttgaactgcttgaaaaatacccggcgtgtgaaatgaaattcagcgaatttatcgcccttctgccaagcatacgcccgcgctattactcgatttcttcatcacctcgtgtcgatgaaaaacaagcaagcatcacggtcagcgttgtctcaggaccggcgtggagcggatatggagaatataaaggaattgcgtcgaactatcttgccgagctgcaagaaggagatacgattacgtgctttatttccacagatcagtcagaatttacgctgccaaaagaccctgaaacgccgcttatcatggtcggaccgggaacaggcgtcgcgccgtttagaggctttgtgcaggcgcgcaaacagctaaaagaacaaggacagtcacttggagaagcacatttatacttcggctgccgttcacctcatgaagactatctgtatcaagaagagcttgaaaacgcccaaagcgaaggcatcattacgcttcataccgctttttctcgcatgccaaatcagccgaaaacatacgttcagcacgtaatggaacaagacggcaagaaattgattgaacttcttgatcaaggagcgcacttctatatttgcggagacggaagccaaatggcacctgccgttgaagcaacgcttatgaaaagctatgctgacgttcaccaagtgagtgaagcagacgctcgcttatggctgcagcagctagaagaaaaaggccgatacgcaaaagacgtgtgggctggg

SEQ ID NO: 454 - protein, 1049 aa, synthetic construct
  REGION 1..1049: note = Variant of cytochrome P450
MTIKEMPQPKTFGELKNLPLLNTDKPVQALMRIADELGEIFKFEAPGSVTRFLSSQRLIKEACDESRFDKNLSQSLKFGRDFLGDGLFTSWTHEPNWKKAHNILGPSFSQRAMKRYHAMMVDIAVQLVQKWERLNADEHIEVSEDMTRLTLDTIGLCGFNYRFNSFYRDQPHPFIVAVVRALDEVMNKLQRANPDDPAYDENKRQCQEDIKVMNDYVDKIIADRKARGEQSHDLLTQMLNGKDPETGEPLDDGNIRYQIITFLIAGHETTSGLLSFALYFLVKNPHVLQKVAEEAARVLVDPVPSYKQVKQLKYVGMVLNEALRLWPTGPAFSLYAKEDTVLGGEYPLTKGDEVMVLIPQLHRDKTIWGDDVEEFRPERFENPSAIPQHAFKPFGNGQRACIGQQFALHEATLVLGMMLKHFDFEDHTNYELVIKERLTLKPEGFVVKAKSKGIPLGGIPSPSTEQSAKKVRKKAENAHNTPLLVLYGSNAGTAEGTARDLADIAMSKGFAPQVATLDSHAGNLPREGAVLIVTASYNGHPPDNAKQFVDWLDQASADEVKGVRYSVFGCGDKNWAATYQKVPAFIDETLAAKGAENIADRGEADASDDFEGTYEEWSDHMWSDVAAYFNLDIENSEDNKSTLSLQFVDSAADMPLAKMHGAFSTNVVASKELQQPGSARSTRHLEIELPKEASYQEGDHLGVIPRNYEGIVNRVTARFGLSASQQIRLEAEEEKLAHLPLAKTVSVEELLQYVELQDPVTRTQLRAMAAKTVCPPHKVELEALLEKQAYKEQVLAKRLTMLELLEKYPACEMKFSEFIALLPSIRPRYYSISSSPRVDEKQASITVSVVSGPAWSGYGEYKGIASNYLAELQEGDTITCFISTDQSEFTLPKDPETPLIMVGPGTGVAPFRGFVQARKQLKEQGQSLGEAHLYFGCRSPHEDYLYQEELENAQSEGIITLHTAFSRMPNQPKTYVQHVMEQDGKKLIELLDQGAHFYICGDGSQMAPAVEATLMKSYADVHQVSEADARLWLQQLEEKGRYAKDVWAG

SEQ ID NO: 455 - DNA, 3147 bp, synthetic construct
  misc_feature 1..3147: note = Variant of cytochrome P450
  source 1..3147: mol_type = other DNA
atgacaattaaggaaatgcctcagcctaagacgtttggagaacttaaaaatttaccgttattaaacacagataaaccggttcaagctttgatgcgtattgcggatgaattaggagaaatctttaaattcgaggcgcctggtagcgtaacgcgctttttatcaagtcagcgtctaattaaagaagcatgcgatgaaagtcgctttgataaaaacttaagtcaatcgctgaaatttgcccgtgattttctgggagacgggttatttacaagctggacgcatgaaccgaattggaaaaaagcgcataatatcttaggcccaagctttagtcagcgtgcaatgaaacgttatcatgcgatgatggtcgatatcgccgtgcagcttgttcaaaagtgggagcgtctaaatgcagatgagcatattgaagtatcggaagacatgacacgtttaacgctggatacaattggtctttgcggcttcaactatcgctttaacagcttttaccgagatcagcctcatccatttattgtgagtgttgtgcgtgcactggatgaagtaatgaacaagctgcagcgagcaaatccagacgacccagcttatgatgaaaacaagcgccagtgtcaagaagatatcaaggtgattaacgactatgtcgataaaattattgcagatcgcaaagcaaggggtgaacaaagccatgatttattaacgcagatgctaaacggaaaagatccagaaacgggtgagccgcttgatgacgggaacattcgttatcaaattattacattcttaatcgcgggacacgaaacaacaagtggtcttttatcatttgcgctgtatttcttagtgaaaaatccacatgtattacaaaaagtagcagaagaagcagcacgagttctagtagatcctgttccaagctacaaacaagtcaaacagcttaaatatgtcggcatggtcttaaacgaagcgctgcgcttatggccaactggtcctgcgttttccctatatgcaaaagaagatacggtgcttggaggagaatatcctttaaccaaaggcgacgaagtaatggttctgattcctcagcttcaccgtgataaaacaatttggggagacgatgtggaggagttccgtccagagcgttttgaaaatccaagtgcgattccgcagcatgcgtttaaaccgtttggaaacggtcagcgtgcgtgtatcggtcagcagttcgctcttcatgaagcaacgctggtacttggtatgatgctaaaacactttgactttgaagatcatacaaactacgagctcgttattaaggaacgcttaacgttaaaacctgaaggctttgtggtaaaagcaaaatcgaaaggcattccgcttggcctgattccttcacctagcactgaacagtctgctaaaaaagtacgcaaaaaggcagaaaacgctcataatacgccgctgcttgtgctatacggttcaaatgcgggaacagctgaaggaacggcgcgtgatttagcagatattgcaatgagcaaaggatttgcaccgcaggtcgcaacgcttgattcacacgccggaaatcttccgcgcgaaggagctgtattaattgtaacggcgtcttataacggtcatccgcctgataacgcaaagcaatttgtcgactggttagaccaagcgtctgctgatgaagtaaaaggcgttcgctactccgtatttggatgcggcgataaaaactgggctgcgacgtatcaaaaagtgcctgcttttatcgatgaaacgcttgccgctaaaggggcagaaaacatcgctgaccgcggtgaagcagatgcaagcgacgactttgaaggcacgtatgaagaatggagtgatcatatgtggagtgacgtagcagcctactttaacctcgacattgaaaacagtgaagataataaatctactctttcacttcaatttgtcgacagcgccgcggatatgccgcttgcgaaaatgcacggtgcgttttcaacgaacgtcgtagcaagcaaagaacttcaacagccaggcagtgcacgaagcacgcgacatcttgaaattgaacttccaaaagaagcttcttatcaagaaggagatcatttaggtgttattcctcgcaactatgaaggaatagtaaaccgtgtaacagcaaggttcggcctaagcgcatcacagcaaatccgtctggaagcagaagaagaaaaattagctcatttgccactcgctaaaacagtatccgtagaagagcttctgcaatacgtggagcttcaagatcctgttacgcgcacgcagcttcgcgcaatggctgctaaaacggtctgcccgccgcataaagtagagcttgaagccttgcttgaaaagcaagcctacaaagaacaagtgctggcaaaacgtttaacaatgcttgaactgcttgaaaaatacccggcgtgtgaaatgaaattcagcgaatttatcgcccttctgccaagcatacgcccgcgctattactcgatttcttcatcacctcgtgtcgatgaaaaacaagcaagcatcacggtcagcgttgtctcaggaccggcgtggagcggatatggagaatataaaggaattgcgtcgaactatcttgccgagctgcaagaaggagatacgattacgtgctttatttccacagatcagtcagaatttacgctgccaaaagaccctgaaacgccgcttatcatggtcggaccgggaacaggcgtcgcgccgtttagaggctttgtgcaggcgcgcaaacagctaaaagaacaaggacagtcacttggagaagcacatttatacttcggctgccgttcacctcatgaagactatctgtatcaagaagagcttgaaaacgcccaaagcgaaggcatcattacgcttcataccgctttttctcgcatgccaaatcagccgaaaacatacgttcagcacgtaatggaacaagacggcaagaaattgattgaacttcttgatcaaggagcgcacttctatatttgcggagacggaagccaaatggcacctgccgttgaagcaacgcttatgaaaagctatgctgacgttcaccaagtgagtgaagcagacgctcgcttatggctgcagcagctagaagaaaaaggccgatacgcaaaagacgtgtgggctggg

SEQ ID NO: 456 - protein, 1049 aa, synthetic construct
  REGION 1..1049: note = Variant of cytochrome P450
MTIKEMPQPKTFGELKNLPLLNTDKPVQALMRIADELGEIFKFEAPGSVTRFLSSQRLIKEACDESRFDKNLSQSLKFARDFLGDGLFTSWTHEPNWKKAHNILGPSFSQRAMKRYHAMMVDIAVQLVQKWERLNADEHIEVSEDMTRLTLDTIGLCGFNYRFNSFYRDQPHPFIVSVVRALDEVMNKLQRANPDDPAYDENKRQCQEDIKVINDYVDKIIADRKARGEQSHDLLTQMLNGKDPETGEPLDDGNIRYQIITFLIAGHETTSGLLSFALYFLVKNPHVLQKVAEEAARVLVDPVPSYKQVKQLKYVGMVLNEALRLWPTGPAFSLYAKEDTVLGGEYPLTKGDEVMVLIPQLHRDKTIWGDDVEEFRPERFENPSAIPQHAFKPFGNGQRACIGQQFALHEATLVLGMMLKHFDFEDHTNYELVIKERLTLKPEGFVVKAKSKGIPLGLIPSPSTEQSAKKVRKKAENAHNTPLLVLYGSNAGTAEGTARDLADIAMSKGFAPQVATLDSHAGNLPREGAVLIVTASYNGHPPDNAKQFVDWLDQASADEVKGVRYSVFGCGDKNWAATYQKVPAFIDETLAAKGAENIADRGEADASDDFEGTYEEWSDHMWSDVAAYFNLDIENSEDNKSTLSLQFVDSAADMPLAKMHGAFSTNVVASKELQQPGSARSTRHLEIELPKEASYQEGDHLGVIPRNYEGIVNRVTARFGLSASQQIRLEAEEEKLAHLPLAKTVSVEELLQYVELQDPVTRTQLRAMAAKTVCPPHKVELEALLEKQAYKEQVLAKRLTMLELLEKYPACEMKFSEFIALLPSIRPRYYSISSSPRVDEKQASITVSVVSGPAWSGYGEYKGIASNYLAELQEGDTITCFISTDQSEFTLPKDPETPLIMVGPGTGVAPFRGFVQARKQLKEQGQSLGEAHLYFGCRSPHEDYLYQEELENAQSEGIITLHTAFSRMPNQPKTYVQHVMEQDGKKLIELLDQGAHFYICGDGSQMAPAVEATLMKSYADVHQVSEADARLWLQQLEEKGRYAKDVWAG

SEQ ID NO: 457 - DNA, 3147 bp, synthetic construct
  misc_feature 1..3147: note = Variant of cytochrome P450
  source 1..3147: mol_type = other DNA
atgacaattaaggaaatgcctcagcctaagacgtttggagaacttaaaaatttaccgttattaaacacagataaaccggttcaagctttgatgcgtattgcggatgaattaggagaaatctttaaattcgaggcgcctggtagcgtaacgcgctttttatcaagtcagcgtctaattaaagaagcatgcgatgaatcacgctttgataaaaacttaagtcaatcgctgaaatttgcccgtgattttctgggagacgggttatttacaagctggacgcatgaaccgaattggaaaaaagcgcataatatcttaggcccaagctttagtcagcgtgcaatgaaacgttatcatgcgatgatggtcgatatcgccgtgcagcttgttcaaaagtgggagcgtctaaatgcagatgagcatattgaagtatcggaagacatgacacgtttaacgctggatacaattggtctttgcggcttcaactatcgctttaacagcttttaccgagatcagcctcatccatttattgtgagtgttgtgcgtgcactggatgaactgatgaacaagctgcagcgagcaaatccagacgacccagcttatgatgaaaacaagcgccagtgtcaagaagatatcaaggtgatgaacgactatgtcgataaaattattgcagatcgcaaagcaaggggtgaacaaagccatgatttattaacgcagatgctaaacggaaaagatccagaaacgggtgagccgcttgatgacgggaacattcgttatcaaattattacattcttaatcgcgggacacgaaacaacaagtggtcttttatcatttgcgctgtatttcttagtgaaaaatccacatgtattacaaaaagtagcagaagaagcagcacgagttctagtagatcctgttccaagctacaaacaagtcaaacagcttaaatatgtcggcatggtcttaaacgaagcgctgcgcttatggccaactggtcctgcgttttccctatatgcaaaagaagatacggtgcttggaggagaatatcctttaaccaaaggcgacgaagtaatggttctgattcctcagcttcaccgtgataaaacaatttggggagacgatgtggaggagttccgtccagagcgttttgaaaatccaagtgcgattccgcagcatgcgtttaaaccgtttggaaacggtcagcgtgcgtgtatcggtcagcagttcgctcttcatgaagcaacgctggtacttggtatgatgctaaaacactttgactttgaagatcatacaaactacgagctcgttattaaagaaaagttaacgttaaaacctgaaggctttgtggtaaaagcaaaatcgaaaggcattccgcttggcctgattccttcacctagcactgaacagtctgctaaaaaagtacgcaaaaaggcagaaaacgctcataatacgccgctgcttgtgctatacggttcaaatgcgggaacagctgaaggaacggcgcgtgatttagcagatattgcaatgagcaaaggatttgcaccgcaggtcgcaacgcttgattcacacgccggaaatcttccgcgcgaaggagctgtattaattgtaacggcgtcttataacggtcatccgcctgataacgcaaagcaatttgtcgactggttagaccaagcgtctgctgatgaagtaaaaggcgttcgctactccgtatttggatgcggcgataaaaactgggctgcgacgtatcaaaaagtgcctgcttttatcgatgaaacgcttgccgctaaaggggcagaaaacatcgctgaccgcggtgaagcagatgcaagcgacgactttgaaggcacatatgaagaatggagtgatcatatgtggagtgacgtagcagcctactttaacctcgacattgaaaacagtgaagataataaatctactctttcacttcaatttgtcgacagcgccgcggatatgccgcttgcgaaaatgcacggtgcgttttcaacgaacgtcgtagcaagcaaagaacttcaacagccaggcagtgcacgaagcacgcgacatcttgaaattgaacttccaaaagaagcttcttatcaagaaggagatcatttaggtgttattcctcgcaactatgaaggaatagtaaaccgtgtaacagcaaggttcggcctaagcgcatcacagcaaatccgtctggaagcagaagaagaaaaattagctcatttgccactcgctaaaacagtatccgtagaagagcttctgcaatacgtggagcttcaagatcctgttacgcgcacgcagcttcgcgcaatggctgctaaaacggtctgcccgccgcataaagtagagcttgaagccttgcttgaaaagcaagcctacaaagaacaagtgctggcaaaacgtttaacaatgcttgaactgcttgaaaaatacccggcgtgtgaaatgaaattcagcgaatttatcgcccttctgccaagcatacgcccgcgctattactcgatttcttcatcacctcgtgtcgatgaaaaacaagcaagcatcacggtcagcgttgtctcaggaccggcgtggagcggatatggagaatataaaggaattgcgtcgaactatcttgccgagctgcaagaaggagatacgattacgtgctttatttccacagatcagtcagaatttacgctgccaaaagaccctgaaacgccgcttatcatggtcggaccgggaacaggcgtcgcgccgtttagaggctttgtgcaggcgcgcaaacagctaaaagaacaaggacagtcacttggagaagcacatttatacttcggctgccgttcacctcatgaagactatctgtatcaagaagagcttgaaaacgcccaaagcgaaggcatcattacgcttcataccgctttttctcgcatgccaaatcagccgaaaacatacgttcagcacgtaatggaacaagacggcaagaaattgattgaacttcttgatcaaggagcgcacttctatatttgcggagacggaagccaaatggcacctgccgttgaagcaacgcttatgaaaagctatgctgacgttcaccaagtgagtgaagcagacgctcgcttatggctgcagcagctagaagaaaaaggccgatacgcaaaagacgtgtgggctggg

SEQ ID NO: 458 - protein, 1049 aa, synthetic construct
  REGION 1..1049: note = Variant of cytochrome P450
MTIKEMPQPKTFGELKNLPLLNTDKPVQALMRIADELGEIFKFEAPGSVTRFLSSQRLIKEACDESRFDKNLSQSLKFARDFLGDGLFTSWTHEPNWKKAHNILGPSFSQRAMKRYHAMMVDIAVQLVQKWERLNADEHIEVSEDMTRLTLDTIGLCGFNYRFNSFYRDQPHPFIVSVVRALDELMNKLQRANPDDPAYDENKRQCQEDIKVMNDYVDKIIADRKARGEQSHDLLTQMLNGKDPETGEPLDDGNIRYQIITFLIAGHETTSGLLSFALYFLVKNPHVLQKVAEEAARVLVDPVPSYKQVKQLKYVGMVLNEALRLWPTGPAFSLYAKEDTVLGGEYPLTKGDEVMVLIPQLHRDKTIWGDDVEEFRPERFENPSAIPQHAFKPFGNGQRACIGQQFALHEATLVLGMMLKHFDFEDHTNYELVIKEKLTLKPEGFVVKAKSKGIPLGLIPSPSTEQSAKKVRKKAENAHNTPLLVLYGSNAGTAEGTARDLADIAMSKGFAPQVATLDSHAGNLPREGAVLIVTASYNGHPPDNAKQFVDWLDQASADEVKGVRYSVFGCGDKNWAATYQKVPAFIDETLAAKGAENIADRGEADASDDFEGTYEEWSDHMWSDVAAYFNLDIENSEDNKSTLSLQFVDSAADMPLAKMHGAFSTNVVASKELQQPGSARSTRHLEIELPKEASYQEGDHLGVIPRNYEGIVNRVTARFGLSASQQIRLEAEEEKLAHLPLAKTVSVEELLQYVELQDPVTRTQLRAMAAKTVCPPHKVELEALLEKQAYKEQVLAKRLTMLELLEKYPACEMKFSEFIALLPSIRPRYYSISSSPRVDEKQASITVSVVSGPAWSGYGEYKGIASNYLAELQEGDTITCFISTDQSEFTLPKDPETPLIMVGPGTGVAPFRGFVQARKQLKEQGQSLGEAHLYFGCRSPHEDYLYQEELENAQSEGIITLHTAFSRMPNQPKTYVQHVMEQDGKKLIELLDQGAHFYICGDGSQMAPAVEATLMKSYADVHQVSEADARLWLQQLEEKGRYAKDVWAG

SEQ ID NO: 459 - DNA, 3147 bp, synthetic construct
  misc_feature 1..3147: note = Variant of cytochrome P450
  source 1..3147: mol_type = other DNA
atgacaattaaggaaatgcctcagcctaagacgtttggagaacttaaaaatttaccgttattaaacacagataaaccggttcaagctttgatgcgtattgcggatgaattaggagaaatctttaaattcgaggcgcctggtagcgtaacgcgctttttatcaagtcagcgtctaattaaagaagcatgcgatgaaagtcgctttgataaaaacttaagtcaatcgctgaaatttggccgtgcttttctgggagacgggttatttacaagctggacgcatgaaccgaattggaaaaaagcgcataatatcttaggcccaagctttagtcagcgtgcaatgaaacgttatcatgcgatgatggtcgatatcgccgtgcagcttgttcaaaagtgggagcgtctaaatgcagatgagcatattgaagtatcggaagacatgacacgtttaacgctggatacaattggtctttgcggcttcaactatcgctttaacagcttttaccgagatcagcctcatccatttattgtgagtgttgtgcgtctgctggatgaaatcatgaacaagctgcagcgagcaaatccagacgacccagcttatgatgaaaacaagcgccagtgtcaagaagctgccaaggtgatgaacgactatgtcgataaaattattgcagatcgcaaagcaaggggtgaacaaagccatgatttattaacgcagatgctaaacggaaaagatccagaaacgggtgagccgcttgatgacgggaacattcgttatcaaattattacattcttaatcgcgggacacgaaacaacaagtggtcttttatcatttgcgctgtatttcttagtgaaaaatccacatgtattacaaaaagtagcagaagaagcagcacgagttctagtagatcctgttccaagctacaaacaagtcaaacagcttaaatatgtcggcatggtcttaaacgaagcgctgcgcttatggccaactggtcctgcgttttccctatatgcaaaagaagatacggtgcttggaggagaatatcctttaaccaaaggcgacgaagtaatggttctgattcctcagcttcaccgtgataaaacaatttggggagacgatgtggaggagttccgtccagagcgttttgaaaatccaagtgcgattccgcagcatgcgtttaaaccgtttggaaacggtcagcgtgcgtgtatcggtcagcagttcgctcttcatgaagcaacgctggtacttggtatgatgctaaaacactttgactttgaagatcatacaaactacgagctcgttattaaggaacgcttaacgttaaaacctgaaggctttgtggtaaaagcaaaatcgaaaggcattccgcttggcctgattccttcacctagcactgaacagtctgctaaaaaagtacgcaaaaaggcagaaaacgctcataatacgccgctgcttgtgctatacggttcaaatgcgggaacagctgaaggaacggcgcgtgatttagcagatattgcaatgagcaaaggatttgcaccgcaggtcgcaacgcttgattcacacgccggaaatcttccgcgcgaaggagctgtattaattgtaacggcgtcttataacggtcatccgcctgataacgcaaagcaatttgtcgactggttagaccaagcgtctgctgatgaagtaaaaggcgttcgctactccgtatttggatgcggcgataaaaactgggctgcgacgtatcaaaaagtgcctgcttttatcgatgaaacgcttgccgctaaaggggcagaaaacatcgctgaccgcggtgaagcagatgcaagcgacgactttgaaggcgcgtatgaagaatggagtgatcatatgtggagtgacgtagcagcctactttaacctcgacattgaaaacagtgaagataataaatctactctttcacttcaatttgtcgacagcgccgcggatatgccgcttgcgaaaatgcacggtgcgttttcaacgaacgtcgtagcaagcaaagaacttcaacagccaggcagtgcacgaagcacgcgacatcttgaaattgaacttccaaaagaagcttcttatcaagaaggagatcatttaggtgttattcctcgcaactatgaaggaatagtaaaccgtgtaacagcaaggttcggcctaagcgcatcacagcaaatccgtctggaagcagaagaagaaaaattagctcatttgccactcgctaaaacagtatccgtagaagagcttctgcaatacgtggagcttcaagatcctgttacgcgcacgcagcttcgcgcaatggctgctaaaacggtctgcccgccgcataaagtagagcttgaagccttgcttgaaaagcaagcctacaaagaacaagtgctggcaaaacgtttaacaatgcttgaactgcttgaaaaatacccggcgtgtgaaatgaaattcagcgaatttatcgcccttctgccaagcatacgcccgcgctattactcgatttcttcatcacctcgtgtcgatgaaaaacaagcaagcatcacggtcagcgttgtctcaggaccggcgtggagcggatatggagaatataaaggaattgcgtcgaactatcttgccgagctgcaagaaggagatacgattacgtgctttatttccacagatcagtcagaatttacgctgccaaaagaccctgaaacgccgcttatcatggtcggaccgggaacaggcgtcgcgccgtttagaggctttgtgcaggcgcgcaaacagctaaaagaacaaggacagtcacttggagaagcacatttatacttcggctgccgttcacctcatgaagactatctgtatcaagaagagcttgaaaacgcccaaagcgaaggcatcattacgcttcataccgctttttctcgcatgccaaatcagccgaaaacatacgttcagcacgtaatggaacaagacggcaagaaattgattgaacttcttgatcaaggagcgcacttctatatttgcggagacggaagccaaatggcacctgccgttgaagcaacgcttatgaaaagctatgctgacgttcaccaagtgagtgaagcagacgctcgcttatggctgcagcagctagaagaaaaaggccgatacgcaaaagacgtgtgggctggg

SEQ ID NO: 460 - protein, 1049 aa, synthetic construct
  REGION 1..1049: note = Variant of cytochrome P450
MTIKEMPQPKTFGELKNLPLLNTDKPVQALMRIADELGEIFKFEAPGSVTRFLSSQRLIKEACDESRFDKNLSQSLKFGRAFLGDGLFTSWTHEPNWKKAHNILGPSFSQRAMKRYHAMMVDIAVQLVQKWERLNADEHIEVSEDMTRLTLDTIGLCGFNYRFNSFYRDQPHPFIVSVVRLLDEIMNKLQRANPDDPAYDENKRQCQEAAKVMNDYVDKIIADRKARGEQSHDLLTQMLNGKDPETGEPLDDGNIRYQIITFLIAGHETTSGLLSFALYFLVKNPHVLQKVAEEAARVLVDPVPSYKQVKQLKYVGMVLNEALRLWPTGPAFSLYAKEDTVLGGEYPLTKGDEVMVLIPQLHRDKTIWGDDVEEFRPERFENPSAIPQHAFKPFGNGQRACIGQQFALHEATLVLGMMLKHFDFEDHTNYELVIKERLTLKPEGFVVKAKSKGIPLGLIPSPSTEQSAKKVRKKAENAHNTPLLVLYGSNAGTAEGTARDLADIAMSKGFAPQVATLDSHAGNLPREGAVLIVTASYNGHPPDNAKQFVDWLDQASADEVKGVRYSVFGCGDKNWAATYQKVPAFIDETLAAKGAENIADRGEADASDDFEGAYEEWSDHMWSDVAAYFNLDIENSEDNKSTLSLQFVDSAADMPLAKMHGAFSTNVVASKELQQPGSARSTRHLEIELPKEASYQEGDHLGVIPRNYEGIVNRVTARFGLSASQQIRLEAEEEKLAHLPLAKTVSVEELLQYVELQDPVTRTQLRAMAAKTVCPPHKVELEALLEKQAYKEQVLAKRLTMLELLEKYPACEMKFSEFIALLPSIRPRYYSISSSPRVDEKQASITVSVVSGPAWSGYGEYKGIASNYLAELQEGDTITCFISTDQSEFTLPKDPETPLIMVGPGTGVAPFRGFVQARKQLKEQGQSLGEAHLYFGCRSPHEDYLYQEELENAQSEGIITLHTAFSRMPNQPKTYVQHVMEQDGKKLIELLDQGAHFYICGDGSQMAPAVEATLMKSYADVHQVSEADARLWLQQLEEKGRYAKDVWAG

SEQ ID NO: 461 - DNA, 3147 bp, synthetic construct
  misc_feature 1..3147: note = Variant of cytochrome P450
  source 1..3147: mol_type = other DNA
atgacaattaaggaaatgcctcagcctaagacgtttggagaacttaaaaatttaccgttattaaacacagataaaccggttcaagctttgatgcgtattgcggatgaattaggagaaatctttaaattcgaggcgcctggtagcgtaacgcgctttttatcaagtcagcgtctaattaaagaagcatgcgatgaacgtcgctttgataaaaacttaagtcaatcgctgaaatttgcccgtgcttttctgggagacgggttatttacaagctggacgcatgaaccgaattggaaaaaagcgcataatatcttaggcccaagctttagtcagcgtgcaatgaaacgttatcatgcgatgatggtcgatatcgccgtgcagcttgttcaaaagtgggagcgtctaaatgcagatgagcatattgaagtatcggaagacatgacacgtttaacgctggatacaattggtctttgcggcttcaactatcgctttaacagcttttaccgagatcagcctcatccatttattgtgagtgttgtgcgtgcactggatgaagtaatgaacaagctgcagcgagcaaatccagacgacccagcttatgatgaaaacaagcgccagtgtcaagaagatatcaaggtgatgaacgactatgtcgataaaattattgcagatcgcaaagcaaggggtgaacaaagccatgatttattaacgcagatgctaaacggaaaagatccagaaacgggtgagccgcttgatgacgggaacattcgttatcaaattattacattcttaatcgcgggacacgaaacaacaagtggtcttttatcatttgcgctgtatttcttagtgaaaaatccacatgtattacaaaaagtagcagaagaagcagcacgagttctagtagatcctgttccaagctacaaacaagtcaaacagcttaaatatgtcggcatggtcttaaacgaagcgctgcgcttatggccaactggtcctgcgttttccctatatgcaaaagaagatacggtgcttggaggagaatatcctttaaccaaaggcgacgaagtaatggttctgattcctcagcttcaccgtgataaaacaatttggggagacgatgtggaggagttccgtccagagcgttttgaaaatccaagtgcgattccgcagcatgcgtttaaaccgtttggaaacggtcagcgtgcgtgtatcggtcagcagttcgctcttcatgaagcaacgctggtacttggtatgatgctaaaacactttgactttgaagatcatacaaactacgagctcgttattaaagaaaagttaacgttaaaacctgaaggctttgtggtaaaagcaaaatcgaaaggcattccgcttggcggtattccttcacctagcactgaacagtctgctaaaaaagtacgcaaaaaggcagaaaacgctcataatacgccgctgcttgtgctatacggttcaaatgcgggaacagctgaaggaacggcgcgtgatttagcagatattgcaatgagcaaaggatttgcaccgcaggtcgcaacgcttgattcacacgccggaaatcttccgcgcgaaggagctgtattaattgtaacggcgtcttataacggtcatccgcctgataacgcaaagcaatttgtcgactggttagaccaagcgtctgctgatgaagtaaaaggcgttcgctactccgtatttggatgcggcgataaaaactgggctgcgacgtatcaaaaagtgcctgcttttatcgatgaaacgcttgccgctaaaggggcagaaaacatcgctgaccgcggtgaagcagatgcaagcgacgactttgaaggcacgtatgaagaatggagtgatcatatgtggagtgacgtagcagcctactttaacctcgacattgaaaacagtgaagataataaatctactctttcacttcaatttgtcgacagcgccgcggatatgccgcttgcgaaaatgcacggtgcgttttcaacgaacgtcgtagcaagcaaagaacttcaacagccaggcagtgcacgaagcacgcgacatcttgaaattgaacttccaaaagaagcttcttatcaagaaggagatcatttaggtgttattcctcgcaactatgaaggaatagtaaaccgtgtaacagcaaggttcggcctaagcgcatcacagcaaatccgtctggaagcagaagaagaaaaattagctcatttgccactcgctaaaacagtatccgtagaagagcttctgcaatacgtggagcttcaagatcctgttacgcgcacgcagcttcgcgcaatggctgctaaaacggtctgcccgccgcataaagtagagcttgaagccttgcttgaaaagcaagcctacaaagaacaagtgctggcaaaacgtttaacaatgcttgaactgcttgaaaaatacccggcgtgtgaaatgaaattcagcgaatttatcgcccttctgccaagcatacgcccgcgctattactcgatttcttcatcacctcgtgtcgatgaaaaacaagcaagcatcacggtcagcgttgtctcaggaccggcgtggagcggatatggagaatataaaggaattgcgtcgaactatcttgccgagctgcaagaaggagatacgattacgtgctttatttccacagatcagtcagaatttacgctgccaaaagaccctgaaacgccgcttatcatggtcggaccgggaacaggcgtcgcgccgtttagaggctttgtgcaggcgcgcaaacagctaaaagaacaaggacagtcacttggagaagcacatttatacttcggctgccgttcacctcatgaagactatctgtatcaagaagagcttgaaaacgcccaaagcgaaggcatcattacgcttcataccgctttttctcgcatgccaaatcagccgaaaacatacgttcagcacgtaatggaacaagacggcaagaaattgattgaacttcttgatcaaggagcgcacttctatatttgcggagacggaagccaaatggcacctgccgttgaagcaacgcttatgaaaagctatgctgacgttcaccaagtgagtgaagcagacgctcgcttatggctgcagcagctagaagaaaaaggccgatacgcaaaagacgtgtgggctggg

SEQ ID NO: 462 - protein, 1049 aa, synthetic construct
  REGION 1..1049: note = Variant of cytochrome P450
MTIKEMPQPKTFGELKNLPLLNTDKPVQALMRIADELGEIFKFEAPGSVTRFLSSQRLIKEACDERRFDKNLSQSLKFARAFLGDGLFTSWTHEPNWKKAHNILGPSFSQRAMKRYHAMMVDIAVQLVQKWERLNADEHIEVSEDMTRLTLDTIGLCGFNYRFNSFYRDQPHPFIVSVVRALDEVMNKLQRANPDDPAYDENKRQCQEDIKVMNDYVDKIIADRKARGEQSHDLLTQMLNGKDPETGEPLDDGNIRYQIITFLIAGHETTSGLLSFALYFLVKNPHVLQKVAEEAARVLVDPVPSYKQVKQLKYVGMVLNEALRLWPTGPAFSLYAKEDTVLGGEYPLTKGDEVMVLIPQLHRDKTIWGDDVEEFRPERFENPSAIPQHAFKPFGNGQRACIGQQFALHEATLVLGMMLKHFDFEDHTNYELVIKEKLTLKPEGFVVKAKSKGIPLGGIPSPSTEQSAKKVRKKAENAHNTPLLVLYGSNAGTAEGTARDLADIAMSKGFAPQVATLDSHAGNLPREGAVLIVTASYNGHPPDNAKQFVDWLDQASADEVKGVRYSVFGCGDKNWAATYQKVPAFIDETLAAKGAENIADRGEADASDDFEGTYEEWSDHMWSDVAAYFNLDIENSEDNKSTLSLQFVDSAADMPLAKMHGAFSTNVVASKELQQPGSARSTRHLEIELPKEASYQEGDHLGVIPRNYEGIVNRVTARFGLSASQQIRLEAEEEKLAHLPLAKTVSVEELLQYVELQDPVTRTQLRAMAAKTVCPPHKVELEALLEKQAYKEQVLAKRLTMLELLEKYPACEMKFSEFIALLPSIRPRYYSISSSPRVDEKQASITVSVVSGPAWSGYGEYKGIASNYLAELQEGDTITCFISTDQSEFTLPKDPETPLIMVGPGTGVAPFRGFVQARKQLKEQGQSLGEAHLYFGCRSPHEDYLYQEELENAQSEGIITLHTAFSRMPNQPKTYVQHVMEQDGKKLIELLDQGAHFYICGDGSQMAPAVEATLMKSYADVHQVSEADARLWLQQLEEKGRYAKDVWAG

SEQ ID NO: 463 - DNA, 3147 bp, synthetic construct
  misc_feature 1..3147: note = Variant of cytochrome P450
  source 1..3147: mol_type = other DNA
atgacaattaaggaaatgcctcagcctaagacgtttggagaacttaaaaatttaccgttattaaacacagataaaccggttcaagctttgatgcgtattgcggatgaattaggagaaatctttaaattcgaggcgcctggtagcgtaacgcgctttttatcaagtcagcgtctaattaaagaagcatgcgatgaacgtcgctttgataaaaacttaagtcaatcgctgaaatttgcccgtgattttctgggagacgggttatttacaagctggacgcatgaaccgaattggaaaaaagcgcataatatcttaggcccaagctttagtcagcgtgcaatgaaacgttatcatgcgatgatggtcgatatcgccgtgcagcttgttcaaaagtgggagcgtctaaatgcagatgagcatattgaagtatcggaagacatgacacgtttaacgctggatacaattggtctttgcggcttcaactatcgctttaacagcttttaccgagatcagcctcatccatttattgtgtcggtagtgcgtgcactggatgaagtaatgaacaagctgcagcgagcaaatccagacgacccagcttatgatgaaaacaagcgccagtgtcaagaagatatcaaggtgatgaacgactatgtcgataaaattattgcagatcgcaaagcaaggggtgaacaaagccatgatttattaacgcagatgctaaacggaaaagatccagaaacgggtgagccgcttgatgacgggaacattcgttatcaaattattacattcttaatcgcgggacacgaaacaacaagtggtcttttatcatttgcgctgtatttcttagtgaaaaatccacatgtattacaaaaagtagcagaagaagcagcacgagttctagtagatcctgttccaagctacaaacaagtcaaacagcttaaatatgtcggcatggtcttaaacgaagcgctgcgcttatggccaactggtcctgcgttttccctatatgcaaaagaagatacggtgcttggaggagaatatcctttaaccaaaggcgacgaagtaatggttctgattcctcagcttcaccgtgataaaacaatttggggagacgatgtggaggagttccgtccagagcgttttgaaaatccaagtgcgattccgcagcatgcgtttaaaccgtttggaaacggtcagcgtgcgtgtatcggtcagcagttcgctcttcatgaagcaacgctggtacttggtatgatgctaaaacactttgactttgaagatcatacaaactacgagctcgttattggcgaaaaattaacgttaaaacctgaaggctttgtggtaaaagcaaaatcgaaaggcattccgcttggcggtattccttcacctagcactgaacagtctgctaaaaaagtacgcaaaaaggcagaaaacgctcataatacgccgctgcttgtgctatacggttcaaatgcgggaacagctgaaggaacggcgcgtgatttagcagatattgcaatgagcaaaggatttgcaccgcaggtcgcaacgcttgattcacacgccggaaatcttccgcgcgaaggagctgtattaattgtaacggcgtcttataacggtcatccgcctgataacgcaaagcaatttgtcgactggttagaccaagcgtctgctgatgaagtaaaaggcgttcgctactccgtatttggatgcggcgataaaaactgggctgcgacgtatcaaaaagtgcctgcttttatcgatgaaacgcttgccgctaaaggggcagaaaacatcgctgaccgcggtgaagcagatgcaagcgacgactttgaaggcacgtatgaagaatggagtgatcatatgtggagtgacgtagcagcctactttaacctcgacattgaaaacagtgaagataataaatctactctttcacttcaatttgtcgacagcgccgcggatatgccgcttgcgaaaatgcacggtgcgttttcaacgaacgtcgtagcaagcaaagaacttcaacagccaggcagtgcacgaagcacgcgacatcttgaaattgaacttccaaaagaagcttcttatcaagaaggagatcatttaggtgttattcctcgcaactatgaaggaatagtaaaccgtgtaacagcaaggttcggcctaagcgcatcacagcaaatccgtctggaagcagaagaagaaaaattagctcatttgccactcgctaaaacagtatccgtagaagagcttctgcaatacgtggagcttcaagatcctgttacgcgcacgcagcttcgcgcaatggctgctaaaacggtctgcccgccgcataaagtagagcttgaagccttgcttgaaaagcaagcctacaaagaacaagtgctggcaaaacgtttaacaatgcttgaactgcttgaaaaatacccggcgtgtgaaatgaaattcagcgaatttatcgcccttctgccaagcatacgcccgcgctattactcgatttcttcatcacctcgtgtcgatgaaaaacaagcaagcatcacggtcagcgttgtctcaggaccggcgtggagcggatatggagaatataaaggaattgcgtcgaactatcttgccgagctgcaagaaggagatacgattacgtgctttatttccacagatcagtcagaatttacgctgccaaaagaccctgaaacgccgcttatcatggtcggaccgggaacaggcgtcgcgccgtttagaggctttgtgcaggcgcgcaaacagctaaaagaacaaggacagtcacttggagaagcacatttatacttcggctgccgttcacctcatgaagactatctgtatcaagaagagcttgaaaacgcccaaagcgaaggcatcattacgcttcataccgctttttctcgcatgccaaatcagccgaaaacatacgttcagcacgtaatggaacaagacggcaagaaattgattgaacttcttgatcaaggagcgcacttctatatttgcggagacggaagccaaatggcacctgccgttgaagcaacgcttatgaaaagctatgctgacgttcaccaagtgagtgaagcagacgctcgcttatggctgcagcagctagaagaaaaaggccgatacgcaaaagacgtgtgggctggg

SEQ ID NO: 464 - protein, 1049 aa, synthetic construct
  REGION 1..1049: note = Variant of cytochrome P450
MTIKEMPQPKTFGELKNLPLLNTDKPVQALMRIADELGEIFKFEAPGSVTRFLSSQRLIKEACDERRFDKNLSQSLKFARDFLGDGLFTSWTHEPNWKKAHNILGPSFSQRAMKRYHAMMVDIAVQLVQKWERLNADEHIEVSEDMTRLTLDTIGLCGFNYRFNSFYRDQPHPFIVSVVRALDEVMNKLQRANPDDPAYDENKRQCQEDIKVMNDYVDKIIADRKARGEQSHDLLTQMLNGKDPETGEPLDDGNIRYQIITFLIAGHETTSGLLSFALYFLVKNPHVLQKVAEEAARVLVDPVPSYKQVKQLKYVGMVLNEALRLWPTGPAFSLYAKEDTVLGGEYPLTKGDEVMVLIPQLHRDKTIWGDDVEEFRPERFENPSAIPQHAFKPFGNGQRACIGQQFALHEATLVLGMMLKHFDFEDHTNYELVIGEKLTLKPEGFVVKAKSKGIPLGGIPSPSTEQSAKKVRKKAENAHNTPLLVLYGSNAGTAEGTARDLADIAMSKGFAPQVATLDSHAGNLPREGAVLIVTASYNGHPPDNAKQFVDWLDQASADEVKGVRYSVFGCGDKNWAATYQKVPAFIDETLAAKGAENIADRGEADASDDFEGTYEEWSDHMWSDVAAYFNLDIENSEDNKSTLSLQFVDSAADMPLAKMHGAFSTNVVASKELQQPGSARSTRHLEIELPKEASYQEGDHLGVIPRNYEGIVNRVTARFGLSASQQIRLEAEEEKLAHLPLAKTVSVEELLQYVELQDPVTRTQLRAMAAKTVCPPHKVELEALLEKQAYKEQVLAKRLTMLELLEKYPACEMKFSEFIALLPSIRPRYYSISSSPRVDEKQASITVSVVSGPAWSGYGEYKGIASNYLAELQEGDTITCFISTDQSEFTLPKDPETPLIMVGPGTGVAPFRGFVQARKQLKEQGQSLGEAHLYFGCRSPHEDYLYQEELENAQSEGIITLHTAFSRMPNQPKTYVQHVMEQDGKKLIELLDQGAHFYICGDGSQMAPAVEATLMKSYADVHQVSEADARLWLQQLEEKGRYAKDVWAG

SEQ ID NO: 465 - DNA, 3147 bp, synthetic construct
  misc_feature 1..3147: note = Variant of cytochrome P450
  source 1..3147: mol_type = other DNA
atgacaattaaggaaatgcctcagcctaagacgtttggagaacttaaaaatttaccgttattaaacacagataaaccggttcaagctttgatgcgtattgcggatgaattaggagaaatctttaaattcgaggcgcctggtagcgtaacgcgctttttatcaagtcagcgtctaattaaagaagcatgcgatgaacgtcgctttgataaaaacttaagtcaatcgctgaaatttgggcgtgattttctgggagacgggttattcacaagctggacgcatgaaccgaattggaaaaaagcgcataatatcttaggcccaagctttagtcagcgtgcaatgaaacgttatcatgcgatgatggtcgatatcgccgtgcagcttgttcaaaagtgggagcgtctaaatgcagatgagcatattgaagtatcggaagacatgacacgtttaacgctggatacaattggtctttgcggcttcaactatcgctttaacagcttttaccgagatcagcctcatccatttattgtgagtgttgtgcgtctgctggatgaactgatgaacaagctgcagcgagcaaatccagacgacccagcttatgatgaaaacaagcgccagtgtcaagaagatattaaggtgatgaacgactatgtcgataaaattattgcagatcgcaaagcaaggggtgaacaaagccatgatttattaacgcagatgctaaacggaaaagatccagaaacgggtgagccgcttgatgacgggaacattcgttatcaaattattacattcttaatcgcgggacacgaaacaacaagtggtcttttatcatttgcgctgtatttcttagtgaaaaatccacatgtattacaaaaagtagcagaagaagcagcacgagttctagtagatcctgttccaagctacaaacaagtcaaacagcttaaatatgtcggcatggtcttaaacgaagcgctgcgcttatggccaactggtcctgcgttttccctatatgcaaaagaagatacggtgcttggaggagaatatcctttaaccaaaggcgacgaagtaatggttctgattcctcagcttcaccgtgataaaacaatttggggagacgatgtggaggagttccgtccagagcgttttgaaaatccaagtgcgattccgcagcatgcgtttaaaccgtttggaaacggtcagcgtgcgtgtatcggtcagcagttcgctcttcatgaagcaacgctggtacttggtatgatgctaaaacactttgactttgaagatcatacaaactacgagctcgttattaaagaaaagttaacgttaaaacctgaaggctttgtggtaaaagcaaaatcgaaaggcattccgcttggcctgattccttcacctagcactgaacagtctgctaaaaaagtacgcaaaaaggcagaaaacgctcataatacgccgctgcttgtgctatacggttcaaatgcgggaacagctgaaggaacggcgcgtgatttagcagatattgcaatgagcaaaggatttgcaccgcaggtcgcaacgcttgattcacacgccggaaatcttccgcgcgaaggagctgtattaattgtaacggcgtcttataacggtcatccgcctgataacgcaaagcaatttgtcgactggttagaccaagcgtctgctgatgaagtaaaaggcgttcgctactccgtatttggatgcggcgataaaaactgggctgcgacgtatcaaaaagtgcctgcttttatcgatgaaacgcttgccgctaaaggggcagaaaacatcgctgaccgcggtgaagcagatgcaagcgacgactttgaaggcacgtatgaagaatggagtgatcatatgtggagtgacgtagcagcctactttaacctcgacattgaaaacagtgaagataataaatctactctttcacttcaatttgtcgacagcgccgcggatatgccgcttgcgaaaatgcacggtgcgttttcaacgaacgtcgtagcaagcaaagaacttcaacagccaggcagtgcacgaagcacgcgacatcttgaaattgaacttccaaaagaagcttcttatcaagaaggagatcatttaggtgttattcctcgcaactatgaaggaatagtaaaccgtgtaacagcaaggttcggcctaagcgcatcacagcaaatccgtctggaagcagaagaagaaaaattagctcatttgccactcgctaaaacagtatccgtagaagagcttctgcaatacgtggagcttcaagatcctgttacgcgcacgcagcttcgcgcaatggctgctaaaacggtctgcccgccgcataaagtagagcttgaagccttgcttgaaaagcaagcctacaaagaacaagtgctggcaaaacgtttaacaatgcttgaactgcttgaaaaatacccggcgtgtgaaatgaaattcagcgaatttatcgcccttctgccaagcatacgcccgcgctattactcgatttcttcatcacctcgtgtcgatgaaaaacaagcaagcatcacggtcagcgttgtctcaggaccggcgtggagcggatatggagaatataaaggaattgcgtcgaactatcttgccgagctgcaagaaggagatacgattacgtgctttatttccacagatcagtcagaatttacgctgccaaaagaccctgaaacgccgcttatcatggtcggaccgggaacaggcgtcgcgccgtttagaggctttgtgcaggcgcgcaaacagctaaaagaacaaggacagtcacttggagaagcacatttatacttcggctgccgttcacctcatgaagactatctgtatcaagaagagcttgaaaacgcccaaagcgaaggcatcattacgcttcataccgctttttctcgcatgccaaatcagccgaaaacatacgttcagcacgtaatggaacaagacggcaagaaattgattgaacttcttgatcaaggagcgcacttctatatttgcggagacggaagccaaatggcacctgccgttgaagcaacgcttatgaaaagctatgctgacgttcaccaagtgagtgaagcagacgctcgcttatggctgcagcagctagaagaaaaaggccgatacgcaaaagacgtgtgggctggg

SEQ ID NO: 466 - protein, 1049 aa, synthetic construct
  REGION 1..1049: note = Variant of cytochrome P450
MTIKEMPQPKTFGELKNLPLLNTDKPVQALMRIADELGEIFKFEAPGSVTRFLSSQRLIKEACDERRFDKNLSQSLKFGRDFLGDGLFTSWTHEPNWKKAHNILGPSFSQRAMKRYHAMMVDIAVQLVQKWERLNADEHIEVSEDMTRLTLDTIGLCGFNYRFNSFYRDQPHPFIVSVVRLLDELMNKLQRANPDDPAYDENKRQCQEDIKVMNDYVDKIIADRKARGEQSHDLLTQMLNGKDPETGEPLDDGNIRYQIITFLIAGHETTSGLLSFALYFLVKNPHVLQKVAEEAARVLVDPVPSYKQVKQLKYVGMVLNEALRLWPTGPAFSLYAKEDTVLGGEYPLTKGDEVMVLIPQLHRDKTIWGDDVEEFRPERFENPSAIPQHAFKPFGNGQRACIGQQFALHEATLVLGMMLKHFDFEDHTNYELVIKEKLTLKPEGFVVKAKSKGIPLGLIPSPSTEQSAKKVRKKAENAHNTPLLVLYGSNAGTAEGTARDLADIAMSKGFAPQVATLDSHAGNLPREGAVLIVTASYNGHPPDNAKQFVDWLDQASADEVKGVRYSVFGCGDKNWAATYQKVPAFIDETLAAKGAENIADRGEADASDDFEGTYEEWSDHMWSDVAAYFNLDIENSEDNKSTLSLQFVDSAADMPLAKMHGAFSTNVVASKELQQPGSARSTRHLEIELPKEASYQEGDHLGVIPRNYEGIVNRVTARFGLSASQQIRLEAEEEKLAHLPLAKTVSVEELLQYVELQDPVTRTQLRAMAAKTVCPPHKVELEALLEKQAYKEQVLAKRLTMLELLEKYPACEMKFSEFIALLPSIRPRYYSISSSPRVDEKQASITVSVVSGPAWSGYGEYKGIASNYLAELQEGDTITCFISTDQSEFTLPKDPETPLIMVGPGTGVAPFRGFVQARKQLKEQGQSLGEAHLYFGCRSPHEDYLYQEELENAQSEGIITLHTAFSRMPNQPKTYVQHVMEQDGKKLIELLDQGAHFYICGDGSQMAPAVEATLMKSYADVHQVSEADARLWLQQLEEKGRYAKDVWAG

SEQ ID NO: 467 - DNA, 3147 bp, synthetic construct
  misc_feature 1..3147: note = Variant of cytochrome P450
  source 1..3147: mol_type = other DNA
atgacaattaaggaaatgcctcagcctaagacgtttggagaacttaaaaatttaccgttattaaacacagataaaccggttcaagctttgatgcgtattgcggatgaattaggagaaatctttaaattcgaggcgcctggtagcgtaacgcgctttttatcaagtcagcgtctaattaaagaagcatgcgatgaacgtcgctttgataaaaacttaagtcaatcgctgaaatttggccgtgattttctgggagacgggttatttacaagctggacgcatgaaccgaattggaaaaaagcgcataatatcttaggcccaagctttagtcagcgtgcaatgaaacgttatcatgcgatgatggtcgatatcgccgtgcagcttgttcaaaagtgggagcgtctaaatgcagatgagcatattgaagtatcggaagacatgacacgtttaacgctggatacaattggtctttgcggcttcaactatcgctttaacagcttttaccgagatcagcctcatccatttattgtgagtgtagtgcgtgcactggatgaagtaatgaacaagctgcagcgagcaaatccagacgacccagcttatgatgaaaacaagcgccagtgtcaagaagatatcaaggtgatgaacgactatgtcgataaaattattgcagatcgcaaagcaaggggtgaacaaagccatgatttattaacgcagatgctaaacggaaaagatccagaaacgggtgagccgcttgatgacgggaacattcgttatcaaattattacattcttaatcgcgggacacgaaacaacaagtggtcttttatcatttgcgctgtatttcttagtgaaaaatccacatgtattacaaaaagtagcagaagaagcagcacgagttctagtagatcctgttccaagctacaaacaagtcaaacagcttaaatatgtcggcatggtcttaaacgaagcgctgcgcttatggccaactggtcctgcgttttccctatatgcaaaagaagatacggtgcttggaggagaatatcctttaaccaaaggcgacgaagtaatggttctgattcctcagcttcaccgtgataaaacaatttggggagacgatgtggaggagttccgtccagagcgttttgaaaatccaagtgcgattccgcagcatgcgtttaaaccgtttggaaacggtcagcgtgcgtgtatcggtcagcagttcgctcttcatgaagcaacgctggtacttggtatgatgctaaaacactttgactttgaagatcatacaaactacgagctcgttattggcgaacgcttaacgttaaaacctgaaggctttgtggtaaaagcaaaatcgaaaggcattccgcttggcggcattccttcacctagcactgaacagtctgctaaaaaagtacgcaaaaaggcagaaaacgctcataatacgccgctgcttgtgctatacggttcaaatgcgggaacagctgaaggaacggcgcgtgatttagcagatattgcaatgagcaaaggatttgcaccgcaggtcgcaacgcttgattcacacgccggaaatcttccgcgcgaaggagctgtattaattgtaacggcgtcttataacggtcatccgcctgataacgcaaagcaatttgtcgactggttagaccaagcgtctgctgatgaagtaaaaggcgttcgctactccgtatttggatgcggcgataaaaactgggctgcgacgtatcaaaaagtgcctgcttttatcgatgaaacgcttgccgctaaaggggcagaaaacatcgctgaccgcggtgaagcagatgcaagcgacgactttgaaggcacgtatgaagaatggagtgatcatatgtggagtgacgtagcagcctactttaacctcgacattgaaaacagtgaagataataaatctactctttcacttcaatttgtcgacagcgccgcggatatgccgcttgcgaaaatgcacggtgcgttttcaacgaacgtcgtagcaagcaaagaacttcaacagccaggcagtgcacgaagcacgcgacatcttgaaattgaacttccaaaagaagcttcttatcaagaaggagatcatttaggtgttattcctcgcaactatgaaggaatagtaaaccgtgtaacagcaaggttcggcctaagcgcatcacagcaaatccgtctggaagcagaagaagaaaaattagctcatttgccactcgctaaaacagtatccgtagaagagcttctgcaatacgtggagcttcaagatcctgttacgcgcacgcagcttcgcgcaatggctgctaaaacggtctgcccgccgcataaagtagagcttgaagccttgcttgaaaagcaagcctacaaagaacaagtgctggcaaaacgtttaacaatgcttgaactgcttgaaaaatacccggcgtgtgaaatgaaattcagcgaatttatcgcccttctgccaagcatacgcccgcgctattactcgatttcttcatcacctcgtgtcgatgaaaaacaagcaagcatcacggtcagcgttgtctcaggaccggcgtggagcggatatggagaatataaaggaattgcgtcgaactatcttgccgagctgcaagaaggagatacgattacgtgctttatttccacagatcagtcagaatttacgctgccaaaagaccctgaaacgccgcttatcatggtcggaccgggaacaggcgtcgcgccgtttagaggctttgtgcaggcgcgcaaacagctaaaagaacaaggacagtcacttggagaagcacatttatacttcggctgccgttcacctcatgaagactatctgtatcaagaagagcttgaaaacgcccaaagcgaaggcatcattacgcttcataccgctttttctcgcatgccaaatcagccgaaaacatacgttcagcacgtaatggaacaagacggcaagaaattgattgaacttcttgatcaaggagcgcacttctatatttgcggagacggaagccaaatggcacctgccgttgaagcaacgcttatgaaaagctatgctgacgttcaccaagtgagtgaagcagacgctcgcttatggctgcagcagctagaagaaaaaggccgatacgcaaaagacgtgtgggctggg

SEQ ID NO: 468 - protein, 1049 aa, synthetic construct
  REGION 1..1049: note = Variant of cytochrome P450
MTIKEMPQPKTFGELKNLPLLNTDKPVQALMRIADELGEIFKFEAPGSVTRFLSSQRLIKEACDERRFDKNLSQSLKFGRDFLGDGLFTSWTHEPNWKKAHNILGPSFSQRAMKRYHAMMVDIAVQLVQKWERLNADEHIEVSEDMTRLTLDTIGLCGFNYRFNSFYRDQPHPFIVSVVRALDEVMNKLQRANPDDPAYDENKRQCQEDIKVMNDYVDKIIADRKARGEQSHDLLTQMLNGKDPETGEPLDDGNIRYQIITFLIAGHETTSGLLSFALYFLVKNPHVLQKVAEEAARVLVDPVPSYKQVKQLKYVGMVLNEALRLWPTGPAFSLYAKEDTVLGGEYPLTKGDEVMVLIPQLHRDKTIWGDDVEEFRPERFENPSAIPQHAFKPFGNGQRACIGQQFALHEATLVLGMMLKHFDFEDHTNYELVIGERLTLKPEGFVVKAKSKGIPLGGIPSPSTEQSAKKVRKKAENAHNTPLLVLYGSNAGTAEGTARDLADIAMSKGFAPQVATLDSHAGNLPREGAVLIVTASYNGHPPDNAKQFVDWLDQASADEVKGVRYSVFGCGDKNWAATYQKVPAFIDETLAAKGAENIADRGEADASDDFEGTYEEWSDHMWSDVAAYFNLDIENSEDNKSTLSLQFVDSAADMPLAKMHGAFSTNVVASKELQQPGSARSTRHLEIELPKEASYQEGDHLGVIPRNYEGIVNRVTARFGLSASQQIRLEAEEEKLAHLPLAKTVSVEELLQYVELQDPVTRTQLRAMAAKTVCPPHKVELEALLEKQAYKEQVLAKRLTMLELLEKYPACEMKFSEFIALLPSIRPRYYSISSSPRVDEKQASITVSVVSGPAWSGYGEYKGIASNYLAELQEGDTITCFISTDQSEFTLPKDPETPLIMVGPGTGVAPFRGFVQARKQLKEQGQSLGEAHLYFGCRSPHEDYLYQEELENAQSEGIITLHTAFSRMPNQPKTYVQHVMEQDGKKLIELLDQGAHFYICGDGSQMAPAVEATLMKSYADVHQVSEADARLWLQQLEEKGRYAKDVWAG

SEQ ID NO: 469 - DNA, 3147 bp, synthetic construct
  misc_feature 1..3147: note = Variant of cytochrome P450
  source 1..3147: mol_type = other DNA
atgacaattaaggaaatgcctcagcctaagacgtttggagaacttaaaaatttaccgttattaaacacagataaaccggttcaagctttgatgcgtattgcggatgaattaggagaaatctttaaattcgaggcgcctggtagcgtaacgcgctttttatcaagtcagcgtctaattaaagaagcatgcgatgaatcacgctttgataaaaacttaagtcaatcgctgaaatttgcccgtgcttttctgggagacgggttattcacaagctggacgcatgaaccgaattggaaaaaagcgcataatatcttaggcccaagctttagtcagcgtgcaatgaaacgttatcatgcgatgatggtcgatatcgccgtgcagcttgttcaaaagtgggagcgtctaaatgcagatgagcatattgaagtatcggaagacatgacacgtttaacgctggatacaattggtctttgcggcttcaactatcgctttaacagcttttaccgagatcagcctcatccatttattgtgagtgttgtgcgtgcactggatgaagtaatgaacaagctgcagcgagcaaatccagacgacccagcttatgatgaaaacaagcgccagtgtcaagaagatatcaaggtgatgaacgactatgtcgataaaattattgcagatcgcaaagcaaggggtgaacaaagccatgatttattaacgcagatgctaaacggaaaagatccagaaacgggtgagccgcttgatgacgggaacattcgttatcaaattattacattcttaatcgcgggacacgaaacaacaagtggtcttttatcatttgcgctgtatttcttagtgaaaaatccacatgtattacaaaaagtagcagaagaagcagcacgagttctagtagatcctgttccaagctacaaacaagtcaaacagcttaaatatgtcggcatggtcttaaacgaagcgctgcgcttatggccaactggtcctgcgttttccctatatgcaaaagaagatacggtgcttggaggagaatatcctttaaccaaaggcgacgaagtaatggttctgattcctcagcttcaccgtgataaaacaatttggggagacgatgtggaggagttccgtccagagcgttttgaaaatccaagtgcgattccgcagcatgcgtttaaaccgtttggaaacggtcagcgtgcgtgtatcggtcagcagttcgctcttcatgaagcaacgctggtacttggtatgatgctaaaacactttgactttgaagatcatacaaactacgagctcgttattaaagaaaagttaacgttaaaacctgaaggctttgtggtaaaagcaaaatcgaaaggcattccgcttggcggcattccttcacctagcactgaacagtctgctaaaaaagtacgcaaaaaggcagaaaacgctcataatacgccgctgcttgtgctatacggttcaaatgcgggaacagctgaaggaacggcgcgtgatttagcagatattgcaatgagcaaaggatttgcaccgcaggtcgcaacgcttgattcacacgccggaaatcttccgcgcgaaggagctgtattaattgtaacggcgtcttataacggtcatccgcctgataacgcaaagcaatttgtcgactggttagaccaagcgtctgctgatgaagtaaaaggcgttcgctactccgtatttggatgcggcgataaaaactgggctgcgacgtatcaaaaagtgcctgcttttatcgatgaaacgcttgccgctaaaggggcagaaaacatcgctgaccgcggtgaagcagatgcaagcgacgactttgaaggcgcgtatgaagaatggagtgatcatatgtggagtgacgtagcagcctactttaacctcgacattgaaaacagtgaagataataaatctactctttcacttcaatttgtcgacagcgccgcggatatgccgcttgcgaaaatgcacggtgcgttttcaacgaacgtcgtagcaagcaaagaacttcaacagccaggcagtgcacgaagcacgcgacatcttgaaattgaacttccaaaagaagcttcttatcaagaaggagatcatttaggtgttattcctcgcaactatgaaggaatagtaaaccgtgtaacagcaaggttcggcctaagcgcatcacagcaaatccgtctggaagcagaagaagaaaaattagctcatttgccactcgctaaaacagtatccgtagaagagcttctgcaatacgtggagcttcaagatcctgttacgcgcacgcagcttcgcgcaatggctgctaaaacggtctgcccgccgcataaagtagagcttgaagccttgcttgaaaagcaagcctacaaagaacaagtgctggcaaaacgtttaacaatgcttgaactgcttgaaaaatacccggcgtgtgaaatgaaattcagcgaatttatcgcccttctgccaagcatacgcccgcgctattactcgatttcttcatcacctcgtgtcgatgaaaaacaagcaagcatcacggtcagcgttgtctcaggaccggcgtggagcggatatggagaatataaaggaattgcgtcgaactatcttgccgagctgcaagaaggagatacgattacgtgctttatttccacagatcagtcagaatttacgctgccaaaagaccctgaaacgccgcttatcatggtcggaccgggaacaggcgtcgcgccgtttagaggctttgtgcaggcgcgcaaacagctaaaagaacaaggacagtcacttggagaagcacatttatacttcggctgccgttcacctcatgaagactatctgtatcaagaagagcttgaaaacgcccaaagcgaaggcatcattacgcttcataccgctttttctcgcatgccaaatcagccgaaaacatacgttcagcacgtaatggaacaagacggcaagaaattgattgaacttcttgatcaaggagcgcacttctatatttgcggagacggaagccaaatggcacctgccgttgaagcaacgcttatgaaaagctatgctgacgttcaccaagtgagtgaagcagacgctcgcttatggctgcagcagctagaagaaaaaggccgatacgcaaaagacgtgtgggctggg

SEQ ID NO: 470 - protein, 1049 aa, synthetic construct
  REGION 1..1049: note = Variant of cytochrome P450
MTIKEMPQPKTFGELKNLPLLNTDKPVQALMRIADELGEIFKFEAPGSVTRFLSSQRLIKEACDESRFDKNLSQSLKFARAFLGDGLFTSWTHEPNWKKAHNILGPSFSQRAMKRYHAMMVDIAVQLVQKWERLNADEHIEVSEDMTRLTLDTIGLCGFNYRFNSFYRDQPHPFIVSVVRALDEVMNKLQRANPDDPAYDENKRQCQEDIKVMNDYVDKIIADRKARGEQSHDLLTQMLNGKDPETGEPLDDGNIRYQIITFLIAGHETTSGLLSFALYFLVKNPHVLQKVAEEAARVLVDPVPSYKQVKQLKYVGMVLNEALRLWPTGPAFSLYAKEDTVLGGEYPLTKGDEVMVLIPQLHRDKTIWGDDVEEFRPERFENPSAIPQHAFKPFGNGQRACIGQQFALHEATLVLGMMLKHFDFEDHTNYELVIKEKLTLKPEGFVVKAKSKGIPLGGIPSPSTEQSAKKVRKKAENAHNTPLLVLYGSNAGTAEGTARDLADIAMSKGFAPQVATLDSHAGNLPREGAVLIVTASYNGHPPDNAKQFVDWLDQASADEVKGVRYSVFGCGDKNWAATYQKVPAFIDETLAAKGAENIADRGEADASDDFEGAYEEWSDHMWSDVAAYFNLDIENSEDNKSTLSLQFVDSAADMPLAKMHGAFSTNVVASKELQQPGSARSTRHLEIELPKEASYQEGDHLGVIPRNYEGIVNRVTARFGLSASQQIRLEAEEEKLAHLPLAKTVSVEELLQYVELQDPVTRTQLRAMAAKTVCPPHKVELEALLEKQAYKEQVLAKRLTMLELLEKYPACEMKFSEFIALLPSIRPRYYSISSSPRVDEKQASITVSVVSGPAWSGYGEYKGIASNYLAELQEGDTITCFISTDQSEFTLPKDPETPLIMVGPGTGVAPFRGFVQARKQLKEQGQSLGEAHLYFGCRSPHEDYLYQEELENAQSEGIITLHTAFSRMPNQPKTYVQHVMEQDGKKLIELLDQGAHFYICGDGSQMAPAVEATLMKSYADVHQVSEADARLWLQQLEEKGRYAKDVWAG

SEQ ID NO: 471 - DNA, 3147 bp, synthetic construct
  misc_feature 1..3147: note = Variant of cytochrome P450
  source 1..3147: mol_type = other DNA
atgacaattaaggaaatgcctcagcctaagacgtttggagaacttaaaaatttaccgttattaaacacagataaaccggttcaagctttgatgcgtattgcggatgaattaggagaaatctttaaattcgaggcgcctggtagcgtaacgcgctttttatcaagtcagcgtctaattaaagaagcatgcgatgaaagtcgctttgataaaaacttaagtcaatcgctgaaatttgcccgtgcttttctgggagacgggttattcacaagctggacgcatgaaccgaattggaaaaaagcgcataatatcttaggcccaagctttagtcagcgtgcaatgaaacgttatcatgcgatgatggtcgatatcgccgtgcagcttgttcaaaagtgggagcgtctaaatgcagatgagcatattgaagtatcggaagacatgacacgtttaacgctggatacaattggtctttgcggcttcaactatcgctttaacagcttttaccgagatcagcctcatccatttattgtgagtgttgtgcgtgcactggatgaagtaatgaacaagctgcagcgagcaaatccagacgacccagcttatgatgaaaacaagcgccagtgtcaagaagatatcaaggtgatgaacgactatgtcgataaaattattgcagatcgcaaagcaaggggtgaacaaagccatgatttattaacgcagatgctaaacggaaaagatccagaaacgggtgagccgcttgatgacgggaacattcgttatcaaattattacattcttaatcgcgggacacgaaacaacaagtggtcttttatcatttgcgctgtatttcttagtgaaaaatccacatgtattacaaaaagtagcagaagaagcagcacgagttctagtagatcctgttccaagctacaaacaagtcaaacagcttaaatatgtcggcatggtcttaaacgaagcgctgcgcttatggccaactggtcctgcgttttccctatatgcaaaagaagatacggtgcttggaggagaatatcctttaaccaaaggcgacgaagtaatggttctgattcctcagcttcaccgtgataaaacaatttggggagacgatgtggaggagttccgtccagagcgttttgaaaatccaagtgcgattccgcagcatgcgtttaaaccgtttggaaacggtcagcgtgcgtgtatcggtcagcagttcgctcttcatgaagcaacgctggtacttggtatgatgctaaaacactttgactttgaagatcatacaaactacgagctcgttattggcgaaaaattaacgttaaaacctgaaggctttgtggtaaaagcaaaatcgaaaggcattccgcttggcctgattccttcacctagcactgaacagtctgctaaaaaagtacgcaaaaaggcagaaaacgctcataatacgccgctgcttgtgctatacggttcaaatgcgggaacagctgaaggaacggcgcgtgatttagcagatattgcaatgagcaaaggatttgcaccgcaggtcgcaacgcttgattcacacgccggaaatcttccgcgcgaaggagctgtattaattgtaacggcgtcttataacggtcatccgcctgataacgcaaagcaatttgtcgactggttagaccaagcgtctgctgatgaagtaaaaggcgttcgctactccgtatttggatgcggcgataaaaactgggctgcgacgtatcaaaaagtgcctgcttttatcgatgaaacgcttgccgctaaaggggcagaaaacatcgctgaccgcggtgaagcagatgcaagcgacgactttgaaggcgcgtatgaagaatggagtgatcatatgtggagtgacgtagcagcctactttaacctcgacattgaaaacagtgaagataataaatctactctttcacttcaatttgtcgacagcgccgcggatatgccgcttgcgaaaatgcacggtgcgttttcaacgaacgtcgtagcaagcaaagaacttcaacagccaggcagtgcacgaagcacgcgacatcttgaaattgaacttccaaaagaagcttcttatcaagaaggagatcatttaggtgttattcctcgcaactatgaaggaatagtaaaccgtgtaacagcaaggttcggcctaagcgcatcacagcaaatccgtctggaagcagaagaagaaaaattagctcatttgccactcgctaaaacagtatccgtagaagagcttctgcaatacgtggagcttcaagatcctgttacgcgcacgcagcttcgcgcaatggctgctaaaacggtctgcccgccgcataaagtagagcttgaagccttgcttgaaaagcaagcctacaaagaacaagtgctggcaaaacgtttaacaatgcttgaactgcttgaaaaatacccggcgtgtgaaatgaaattcagcgaatttatcgcccttctgccaagcatacgcccgcgctattactcgatttcttcatcacctcgtgtcgatgaaaaacaagcaagcatcacggtcagcgttgtctcaggaccggcgtggagcggatatggagaatataaaggaattgcgtcgaactatcttgccgagctgcaagaaggagatacgattacgtgctttatttccacagatcagtcagaatttacgctgccaaaagaccctgaaacgccgcttatcatggtcggaccgggaacaggcgtcgcgccgtttagaggctttgtgcaggcgcgcaaacagctaaaagaacaaggacagtcacttggagaagcacatttatacttcggctgccgttcacctcatgaagactatctgtatcaagaagagcttgaaaacgcccaaagcgaaggcatcattacgcttcataccgctttttctcgcatgccaaatcagccgaaaacatacgttcagcacgtaatggaacaagacggcaagaaattgattgaacttcttgatcaaggagcgcacttctatatttgcggagacggaagccaaatggcacctgccgttgaagcaacgcttatgaaaagctatgctgacgttcaccaagtgagtgaagcagacgctcgcttatggctgcagcagctagaagaaaaaggccgatacgcaaaagacgtgtgggctggg

SEQ ID NO: 472 - protein, 1049 aa, synthetic construct
  REGION 1..1049: note = Variant of cytochrome P450
MTIKEMPQPKTFGELKNLPLLNTDKPVQALMRIADELGEIFKFEAPGSVTRFLSSQRLIKEACDESRFDKNLSQSLKFARAFLGDGLFTSWTHEPNWKKAHNILGPSFSQRAMKRYHAMMVDIAVQLVQKWERLNADEHIEVSEDMTRLTLDTIGLCGFNYRFNSFYRDQPHPFIVSVVRALDEVMNKLQRANPDDPAYDENKRQCQEDIKVMNDYVDKIIADRKARGEQSHDLLTQMLNGKDPETGEPLDDGNIRYQIITFLIAGHETTSGLLSFALYFLVKNPHVLQKVAEEAARVLVDPVPSYKQVKQLKYVGMVLNEALRLWPTGPAFSLYAKEDTVLGGEYPLTKGDEVMVLIPQLHRDKTIWGDDVEEFRPERFENPSAIPQHAFKPFGNGQRACIGQQFALHEATLVLGMMLKHFDFEDHTNYELVIGEKLTLKPEGFVVKAKSKGIPLGLIPSPSTEQSAKKVRKKAENAHNTPLLVLYGSNAGTAEGTARDLADIAMSKGFAPQVATLDSHAGNLPREGAVLIVTASYNGHPPDNAKQFVDWLDQASADEVKGVRYSVFGCGDKNWAATYQKVPAFIDETLAAKGAENIADRGEADASDDFEGAYEEWSDHMWSDVAAYFNLDIENSEDNKSTLSLQFVDSAADMPLAKMHGAFSTNVVASKELQQPGSARSTRHLEIELPKEASYQEGDHLGVIPRNYEGIVNRVTARFGLSASQQIRLEAEEEKLAHLPLAKTVSVEELLQYVELQDPVTRTQLRAMAAKTVCPPHKVELEALLEKQAYKEQVLAKRLTMLELLEKYPACEMKFSEFIALLPSIRPRYYSISSSPRVDEKQASITVSVVSGPAWSGYGEYKGIASNYLAELQEGDTITCFISTDQSEFTLPKDPETPLIMVGPGTGVAPFRGFVQARKQLKEQGQSLGEAHLYFGCRSPHEDYLYQEELENAQSEGIITLHTAFSRMPNQPKTYVQHVMEQDGKKLIELLDQGAHFYICGDGSQMAPAVEATLMKSYADVHQVSEADARLWLQQLEEKGRYAKDVWAG

SEQ ID NO: 473 - DNA, 3147 bp, synthetic construct
  misc_feature 1..3147: note = Variant of cytochrome P450
  source 1..3147: mol_type = other DNA
atgacaattaaggaaatgcctcagcctaagacgtttggagaacttaaaaatttaccgttattaaacacagataaaccggttcaagctttgatgcgtattgcggatgaattaggagaaatctttaaattcgaggcgcctggtagcgtaacgcgctttttatcaagtcagcgtctaattaaagaagcatgcgatgaaagtcgctttgataaaaacttaagtcaatcgctgaaatttgcccgtgattttctgggagacgggttattcacaagctggacgcatgaaccgaattggaaaaaagcgcataatatcttaggcccaagctttagtcagcgtgcaatgaaacgttatcatgcgatgatggtcgatatcgccgtgcagcttgttcaaaagtgggagcgtctaaatgcagatgagcatattgaagtatcggaagacatgacacgtttaacgctggatacaattggtctttgcggcttcaactatcgctttaacagcttttaccgagatcagcctcatccatttattgtgagtgttgtgcgtctgctggatgaagtcatgaacaagctgcagcgagcaaatccagacgacccagcttatgatgaaaacaagcgccagtgtcaagaagctattaaggtgatgaacgactatgtcgataaaattattgcagatcgcaaagcaaggggtgaacaaagccatgatttattaacgcagatgctaaacggaaaagatccagaaacgggtgagccgcttgatgacgggaacattcgttatcaaattattacattcttaatcgcgggacacgaaacaacaagtggtcttttatcatttgcgctgtatttcttagtgaaaaatccacatgtattacaaaaagtagcagaagaagcagcacgagttctagtagatcctgttccaagctacaaacaagtcaaacagcttaaatatgtcggcatggtcttaaacgaagcgctgcgcttatggccaactggtcctgcgttttccctatatgcaaaagaagatacggtgcttggaggagaatatcctttaaccaaaggcgacgaagtaatggttctgattcctcagcttcaccgtgataaaacaatttggggagacgatgtggaggagttccgtccagagcgttttgaaaatccaagtgcgattccgcagcatgcgtttaaaccgtttggaaacggtcagcgtgcgtgtatcggtcagcagttcgctcttcatgaagcaacgctggtacttggtatgatgctaaaacactttgactttgaagatcatacaaactacgagctcgttattaaggaacgcttaacgttaaaacctgaaggctttgtggtaaaagcaaaatcgaaaggcattccgcttggcggtattccttcacctagcactgaacagtctgctaaaaaagtacgcaaaaaggcagaaaacgctcataatacgccgctgcttgtgctatacggttcaaatgcgggaacagctgaaggaacggcgcgtgatttagcagatattgcaatgagcaaaggatttgcaccgcaggtcgcaacgcttgattcacacgccggaaatcttccgcgcgaaggagctgtattaattgtaacggcgtcttataacggtcatccgcctgataacgcaaagcaatttgtcgactggttagaccaagcgtctgctgatgaagtaaaaggcgttcgctactccgtatttggatgcggcgataaaaactgggctgcgacgtatcaaaaagtgcctgcttttatcgatgaaacgcttgccgctaaaggggcagaaaacatcgctgaccgcggtgaagcagatgcaagcgacgactttgaaggcgcgtatgaagaatggagtgatcatatgtggagtgacgtagcagcctactttaacctcgacattgaaaacagtgaagataataaatctactctttcacttcaatttgtcgacagcgccgcggatatgccgcttgcgaaaatgcacggtgcgttttcaacgaacgtcgtagcaagcaaagaacttcaacagccaggcagtgcacgaagcacgcgacatcttgaaattgaacttccaaaagaagcttcttatcaagaaggagatcatttaggtgttattcctcgcaactatgaaggaatagtaaaccgtgtaacagcaaggttcggcctaagcgcatcacagcaaatccgtctggaagcagaagaagaaaaattagctcatttgccactcgctaaaacagtatccgtagaagagcttctgcaatacgtggagcttcaagatcctgttacgcgcacgcagcttcgcgcaatggctgctaaaacggtctgcccgccgcataaagtagagcttgaagccttgcttgaaaagcaagcctacaaagaacaagtgctggcaaaacgtttaacaatgcttgaactgcttgaaaaatacccggcgtgtgaaatgaaattcagcgaatttatcgcccttctgccaagcatacgcccgcgctattactcgatttcttcatcacctcgtgtcgatgaaaaacaagcaagcatcacggtcagcgttgtctcaggaccggcgtggagcggatatggagaatataaaggaattgcgtcgaactatcttgccgagctgcaagaaggagatacgattacgtgctttatttccacagatcagtcagaatttacgctgccaaaagaccctgaaacgccgcttatcatggtcggaccgggaacaggcgtcgcgccgtttagaggctttgtgcaggcgcgcaaacagctaaaagaacaaggacagtcacttggagaagcacatttatacttcggctgccgttcacctcatgaagactatctgtatcaagaagagcttgaaaacgcccaaagcgaaggcatcattacgcttcataccgctttttctcgcatgccaaatcagccgaaaacatacgttcagcacgtaatggaacaagacggcaagaaattgattgaacttcttgatcaaggagcgcacttctatatttgcggagacggaagccaaatggcacctgccgttgaagcaacgcttatgaaaagctatgctgacgttcaccaagtgagtgaagcagacgctcgcttatggctgcagcagctagaagaaaaaggccgatacgcaaaagacgtgtgggctggg

SEQ ID NO: 474 - protein, 1049 aa, synthetic construct
  REGION 1..1049: note = Variant of cytochrome P450
MTIKEMPQPKTFGELKNLPLLNTDKPVQALMRIADELGEIFKFEAPGSVTRFLSSQRLIKEACDESRFDKNLSQSLKFARDFLGDGLFTSWTHEPNWKKAHNILGPSFSQRAMKRYHAMMVDIAVQLVQKWERLNADEHIEVSEDMTRLTLDTIGLCGFNYRFNSFYRDQPHPFIVSVVRLLDEVMNKLQRANPDDPAYDENKRQCQEAIKVMNDYVDKIIADRKARGEQSHDLLTQMLNGKDPETGEPLDDGNIRYQIITFLIAGHETTSGLLSFALYFLVKNPHVLQKVAEEAARVLVDPVPSYKQVKQLKYVGMVLNEALRLWPTGPAFSLYAKEDTVLGGEYPLTKGDEVMVLIPQLHRDKTIWGDDVEEFRPERFENPSAIPQHAFKPFGNGQRACIGQQFALHEATLVLGMMLKHFDFEDHTNYELVIKERLTLKPEGFVVKAKSKGIPLGGIPSPSTEQSAKKVRKKAENAHNTPLLVLYGSNAGTAEGTARDLADIAMSKGFAPQVATLDSHAGNLPREGAVLIVTASYNGHPPDNAKQFVDWLDQASADEVKGVRYSVFGCGDKNWAATYQKVPAFIDETLAAKGAENIADRGEADASDDFEGAYEEWSDHMWSDVAAYFNLDIENSEDNKSTLSLQFVDSAADMPLAKMHGAFSTNVVASKELQQPGSARSTRHLEIELPKEASYQEGDHLGVIPRNYEGIVNRVTARFGLSASQQIRLEAEEEKLAHLPLAKTVSVEELLQYVELQDPVTRTQLRAMAAKTVCPPHKVELEALLEKQAYKEQVLAKRLTMLELLEKYPACEMKFSEFIALLPSIRPRYYSISSSPRVDEKQASITVSVVSGPAWSGYGEYKGIASNYLAELQEGDTITCFISTDQSEFTLPKDPETPLIMVGPGTGVAPFRGFVQARKQLKEQGQSLGEAHLYFGCRSPHEDYLYQEELENAQSEGIITLHTAFSRMPNQPKTYVQHVMEQDGKKLIELLDQGAHFYICGDGSQMAPAVEATLMKSYADVHQVSEADARLWLQQLEEKGRYAKDVWAG

SEQ ID NO: 475 - DNA, 3147 bp, synthetic construct
  misc_feature 1..3147: note = Variant of cytochrome P450
  source 1..3147: mol_type = other DNA
atgacaattaaggaaatgcctcagcctaagacgtttggagaacttaaaaatttaccgttattaaacacagataaaccggttcaagctttgatgcgtattgcggatgaattaggagaaatctttaaattcgaggcgcctggtagcgtaacgcgctttttatcaagtcagcgtctaattaaagaagcatgcgatgaatcacgctttgataaaaacttaagtcaatcgctgaaatttgcccgtgcttttctgggagacgggttatttacaagctggacgcatgaaccgaattggaaaaaagcgcataatatcttaggcccaagctttagtcagcgtgcaatgaaacgttatcatgcgatgatggtcgatatcgccgtgcagcttgttcaaaagtgggagcgtctaaatgcagatgagcatattgaagtatcggaagacatgacacgtttaacgctggatacaattggtctttgcggcttcaactatcgctttaacagcttttaccgagatcagcctcatccatttattgtgagtgttgtgcgtgcactggatgaagtaatgaacaagctgcagcgagcaaatccagacgacccagcttatgatgaaaacaagcgccagtttcaagaagatatcaaggtgatgaacgactatgtcgataaaattattgcagatcgcaaagcaaggggtgaacaaagccatgatttattaacgcagatgctaaacggaaaagatccagaaacgggtgagccgcttgatgacgggaacattcgttatcaaattattacattcttaatcgcgggacacgaaacaacaagtggtcttttatcatttgcgctgtatttcttagtgaaaaatccacatgtattacaaaaagtagcagaagaagcagcacgagttctagtagatcctgttccaagctacaaacaagtcaaacagcttaaatatgtcggcatggtcttaaacgaagcgctgcgcttatggccaactggtcctgcgttttccctatatgcaaaagaagatacggtgcttggaggagaatatcctttaaccaaaggcgacgaagtaatggttctgattcctcagcttcaccgtgataaaacaatttggggagacgatgtggaggagttccgtccagagcgttttgaaaatccaagtgcgattccgcagcatgcgtttaaaccgtttggaaacggtcagcgtgcgtgtatcggtcagcagttcgctcttcatgaagcaacgctggtacttggtatgatgctaaaacactttgactttgaagatcatacaaactacgagctcgttattaaagaaaagttaacgttaaaacctgaaggctttgtggtaaaagcaaaatcgaaaggcattccgcttggcggtattccttcacctagcactgaacagtctgctaaaaaagtacgcaaaaaggcagaaaacgctcataatacgccgctgcttgtgctatacggttcaaatgcgggaacagctgaaggaacggcgcgtgatttagcagatattgcaatgagcaaaggatttgcaccgcaggtcgcaacgcttgattcacacgccggaaatcttccgcgcgaaggagctgtattaattgtaacggcgtcttataacggtcatccgcctgataacgcaaagcaatttgtcgactggttagaccaagcgtctgctgatgaagtaaaaggcgttcgctactccgtatttggatgcggcgataaaaactgggctgcgacgtatcaaaaagtgcctgcttttatcgatgaaacgcttgccgctaaaggggcagaaaacatcgctgaccgcggtgaagcagatgcaagcgacgactttgaaggcgcgtatgaagaatggagtgatcatatgtggagtgacgtagcagcctactttaacctcgacattgaaaacagtgaagataataaatctactctttcacttcaatttgtcgacagcgccgcggatatgccgcttgcgaaaatgcacggtgcgttttcaacgaacgtcgtagcaagcaaagaacttcaacagccaggcagtgcacgaagcacgcgacatcttgaaattgaacttccaaaagaagcttcttatcaagaaggagatcatttaggtgttattcctcgcaactatgaaggaatagtaaaccgtgtaacagcaaggttcggcctaagcgcatcacagcaaatccgtctggaagcagaagaagaaaaattagctcatttgccactcgctaaaacagtatccgtagaagagcttctgcaatacgtggagcttcaagatcctgttacgcgcacgcagcttcgcgcaatggctgctaaaacggtctgcccgccgcataaagtagagcttgaagccttgcttgaaaagcaagcctacaaagaacaagtgctggcaaaacgtttaacaatgcttgaactgcttgaaaaatacccggcgtgtgaaatgaaattcagcgaatttatcgcccttctgccaagcatacgcccgcgctattactcgatttcttcatcacctcgtgtcgatgaaaaacaagcaagcatcacggtcagcgttgtctcaggaccggcgtggagcggatatggagaatataaaggaattgcgtcgaactatcttgccgagctgcaagaaggagatacgattacgtgctttatttccacagatcagtcagaatttacgctgccaaaagaccctgaaacgccgcttatcatggtcggaccgggaacaggcgtcgcgccgtttagaggctttgtgcaggcgcgcaaacagctaaaagaacaaggacagtcacttggagaagcacatttatacttcggctgccgttcacctcatgaagactatctgtatcaagaagagcttgaaaacgcccaaagcgaaggcatcattacgcttcataccgctttttctcgcatgccaaatcagccgaaaacatacgttcagcacgtaatggaacaagacggcaagaaattgattgaacttcttgatcaaggagcgcacttctatatttgcggagacggaagccaaatggcacctgccgttgaagcaacgcttatgaaaagctatgctgacgttcaccaagtgagtgaagcagacgctcgcttatggctgcagcagctagaagaaaaaggccgatacgcaaaagacgtgtgggctggg

SEQ ID NO: 476 - protein, 1049 aa, synthetic construct
  REGION 1..1049: note = Variant of cytochrome P450
MTIKEMPQPKTFGELKNLPLLNTDKPVQALMRIADELGEIFKFEAPGSVTRFLSSQRLIKEACDESRFDKNLSQSLKFARAFLGDGLFTSWTHEPNWKKAHNILGPSFSQRAMKRYHAMMVDIAVQLVQKWERLNADEHIEVSEDMTRLTLDTIGLCGFNYRFNSFYRDQPHPFIVSVVRALDEVMNKLQRANPDDPAYDENKRQFQEDIKVMNDYVDKIIADRKARGEQSHDLLTQMLNGKDPETGEPLDDGNIRYQIITFLIAGHETTSGLLSFALYFLVKNPHVLQKVAEEAARVLVDPVPSYKQVKQLKYVGMVLNEALRLWPTGPAFSLYAKEDTVLGGEYPLTKGDEVMVLIPQLHRDKTIWGDDVEEFRPERFENPSAIPQHAFKPFGNGQRACIGQQFALHEATLVLGMMLKHFDFEDHTNYELVIKEKLTLKPEGFVVKAKSKGIPLGGIPSPSTEQSAKKVRKKAENAHNTPLLVLYGSNAGTAEGTARDLADIAMSKGFAPQVATLDSHAGNLPREGAVLIVTASYNGHPPDNAKQFVDWLDQASADEVKGVRYSVFGCGDKNWAATYQKVPAFIDETLAAKGAENIADRGEADASDDFEGAYEEWSDHMWSDVAAYFNLDIENSEDNKSTLSLQFVDSAADMPLAKMHGAFSTNVVASKELQQPGSARSTRHLEIELPKEASYQEGDHLGVIPRNYEGIVNRVTARFGLSASQQIRLEAEEEKLAHLPLAKTVSVEELLQYVELQDPVTRTQLRAMAAKTVCPPHKVELEALLEKQAYKEQVLAKRLTMLELLEKYPACEMKFSEFIALLPSIRPRYYSISSSPRVDEKQASITVSVVSGPAWSGYGEYKGIASNYLAELQEGDTITCFISTDQSEFTLPKDPETPLIMVGPGTGVAPFRGFVQARKQLKEQGQSLGEAHLYFGCRSPHEDYLYQEELENAQSEGIITLHTAFSRMPNQPKTYVQHVMEQDGKKLIELLDQGAHFYICGDGSQMAPAVEATLMKSYADVHQVSEADARLWLQQLEEKGRYAKDVWAG

SEQ ID NO: 477 - DNA, 3147 bp, synthetic construct
  misc_feature 1..3147: note = Variant of cytochrome P450
  source 1..3147: mol_type = other DNA
atgacaattaaggaaatgcctcagcctaagacgtttggagaacttaaaaatttaccgttattaaacacagataaaccggttcaagctttgatgcgtattgcggatgaattaggagaaatctttaaattcgaggcgcctggtagcgtaacgcgctttttatcaagtcagcgtctaattaaagaagcatgcgatgaatcacgctttgataaaaacttaagtcaatcgctgaaatttgggcgtgattttctgggagacgggttatttacaagctggacgcatgaaccgaattggaaaaaagcgcataatatcttaggcccaagctttagtcagcgtgcaatgaaacgttatcatgcgatgatggtcgatatcgccgtgcagcttgttcaaaagtgggagcgtctaaatgcagatgagcatattgaagtatcggaagacatgacacgtttaacgctggatacaattggtctttgcggcttcaactatcgctttaacagcttttaccgagatcagcctcatccatttattgtgagtgttgtgcgtgcactggatgaagtaatgaacaagctgcagcgagcaaatccagacgacccagcttatgatgaaaacaagcgccagtttcaagaagatatcaaggtgatgaacgactatgtcgataaaattattgcagatcgcaaagcaaggggtgaacaaagccatgatttattaacgcagatgctaaacggaaaagatccagaaacgggtgagccgcttgatgacgggaacattcgttatcaaattattacattcttaatcgcgggacacgaaacaacaagtggtcttttatcatttgcgctgtatttcttagtgaaaaatccacatgtattacaaaaagtagcagaagaagcagcacgagttctagtagatcctgttccaagctacaaacaagtcaaacagcttaaatatgtcggcatggtcttaaacgaagcgctgcgcttatggccaactggtcctgcgttttccctatatgcaaaagaagatacggtgcttggaggagaatatcctttaaccaaaggcgacgaagtaatggttctgattcctcagcttcaccgtgataaaacaatttggggagacgatgtggaggagttccgtccagagcgttttgaaaatccaagtgcgattccgcagcatgcgtttaaaccgtttggaaacggtcagcgtgcgtgtatcggtcagcagttcgctcttcatgaagcaacgctggtacttggtatgatgctaaaacactttgactttgaagatcatacaaactacgagctcgttattaaggaacgcttaacgttaaaacctgaaggctttgtggtaaaagcaaaatcgaaaggcattccgcttggcctgattccttcacctagcactgaacagtctgctaaaaaagtacgcaaaaaggcagaaaacgctcataatacgccgctgcttgtgctatacggttcaaatgcgggaacagctgaaggaacggcgcgtgatttagcagatattgcaatgagcaaaggatttgcaccgcaggtcgcaacgcttgattcacacgccggaaatcttccgcgcgaaggagctgtattaattgtaacggcgtcttataacggtcatccgcctgataacgcaaagcaatttgtcgactggttagaccaagcgtctgctgatgaagtaaaaggcgttcgctactccgtatttggatgcggcgataaaaactgggctgcgacgtatcaaaaagtgcctgcttttatcgatgaaacgcttgccgctaaaggggcagaaaacatcgctgaccgcggtgaagcagatgcaagcgacgactttgaaggcgcgtatgaagaatggagtgatcatatgtggagtgacgtagcagcctactttaacctcgacattgaaaacagtgaagataataaatctactctttcacttcaatttgtcgacagcgccgcggatatgccgcttgcgaaaatgcacggtgcgttttcaacgaacgtcgtagcaagcaaagaacttcaacagccaggcagtgcacgaagcacgcgacatcttgaaattgaacttccaaaagaagcttcttatcaagaaggagatcatttaggtgttattcctcgcaactatgaaggaatagtaaaccgtgtaacagcaaggttcggcctaagcgcatcacagcaaatccgtctggaagcagaagaagaaaaattagctcatttgccactcgctaaaacagtatccgtagaagagcttctgcaatacgtggagcttcaagatcctgttacgcgcacgcagcttcgcgcaatggctgctaaaacggtctgcccgccgcataaagtagagcttgaagccttgcttgaaaagcaagcctacaaagaacaagtgctggcaaaacgtttaacaatgcttgaactgcttgaaaaatacccggcgtgtgaaatgaaattcagcgaatttatcgcccttctgccaagcatacgcccgcgctattactcgatttcttcatcacctcgtgtcgatgaaaaacaagcaagcatcacggtcagcgttgtctcaggaccggcgtggagcggatatggagaatataaaggaattgcgtcgaactatcttgccgagctgcaagaaggagatacgattacgtgctttatttccacagatcagtcagaatttacgctgccaaaagaccctgaaacgccgcttatcatggtcggaccgggaacaggcgtcgcgccgtttagaggctttgtgcaggcgcgcaaacagctaaaagaacaaggacagtcacttggagaagcacatttatacttcggctgccgttcacctcatgaagactatctgtatcaagaagagcttgaaaacgcccaaagcgaaggcatcattacgcttcataccgctttttctcgcatgccaaatcagccgaaaacatacgttcagcacgtaatggaacaagacggcaagaaattgattgaacttcttgatcaaggagcgcacttctatatttgcggagacggaagccaaatggcacctgccgttgaagcaacgcttatgaaaagctatgctgacgttcaccaagtgagtgaagcagacgctcgcttatggctgcagcagctagaagaaaaaggccgatacgcaaaagacgtgtgggctggg

SEQ ID NO: 478 - protein, 1049 aa, synthetic construct
  REGION 1..1049: note = Variant of cytochrome P450
MTIKEMPQPKTFGELKNLPLLNTDKPVQALMRIADELGEIFKFEAPGSVTRFLSSQRLIKEACDESRFDKNLSQSLKFGRDFLGDGLFTSWTHEPNWKKAHNILGPSFSQRAMKRYHAMMVDIAVQLVQKWERLNADEHIEVSEDMTRLTLDTIGLCGFNYRFNSFYRDQPHPFIVSVVRALDEVMNKLQRANPDDPAYDENKRQFQEDIKVMNDYVDKIIADRKARGEQSHDLLTQMLNGKDPETGEPLDDGNIRYQIITFLIAGHETTSGLLSFALYFLVKNPHVLQKVAEEAARVLVDPVPSYKQVKQLKYVGMVLNEALRLWPTGPAFSLYAKEDTVLGGEYPLTKGDEVMVLIPQLHRDKTIWGDDVEEFRPERFENPSAIPQHAFKPFGNGQRACIGQQFALHEATLVLGMMLKHFDFEDHTNYELVIKERLTLKPEGFVVKAKSKGIPLGLIPSPSTEQSAKKVRKKAENAHNTPLLVLYGSNAGTAEGTARDLADIAMSKGFAPQVATLDSHAGNLPREGAVLIVTASYNGHPPDNAKQFVDWLDQASADEVKGVRYSVFGCGDKNWAATYQKVPAFIDETLAAKGAENIADRGEADASDDFEGAYEEWSDHMWSDVAAYFNLDIENSEDNKSTLSLQFVDSAADMPLAKMHGAFSTNVVASKELQQPGSARSTRHLEIELPKEASYQEGDHLGVIPRNYEGIVNRVTARFGLSASQQIRLEAEEEKLAHLPLAKTVSVEELLQYVELQDPVTRTQLRAMAAKTVCPPHKVELEALLEKQAYKEQVLAKRLTMLELLEKYPACEMKFSEFIALLPSIRPRYYSISSSPRVDEKQASITVSVVSGPAWSGYGEYKGIASNYLAELQEGDTITCFISTDQSEFTLPKDPETPLIMVGPGTGVAPFRGFVQARKQLKEQGQSLGEAHLYFGCRSPHEDYLYQEELENAQSEGIITLHTAFSRMPNQPKTYVQHVMEQDGKKLIELLDQGAHFYICGDGSQMAPAVEATLMKSYADVHQVSEADARLWLQQLEEKGRYAKDVWAG

SEQ ID NO: 479 - DNA, 3147 bp, synthetic construct
  misc_feature 1..3147: note = Variant of cytochrome P450
  source 1..3147: mol_type = other DNA
atgacaattaaggaaatgcctcagcctaagacgtttggagaacttaaaaatttaccgttattaaacacagataaaccggttcaagctttgatgcgtattgcggatgaattaggagaaatctttaaattcgaggcgcctggtagcgtaacgcgctttttatcaagtcagcgtctaattaaagaagcatgcgatgaacgtcgctttgataaaaacttaagtcaatcgctgaaatttggccgtgattttctgggagacgggttattcacaagctggacgcatgaaccgaattggaaaaaagcgcataatatcttaggcccaagctttagtcagcgtgcaatgaaacgttatcatgcgatgatggtcgatatcgccgtgcagcttgttcaaaagtgggagcgtctaaatgcagatgagcatattgaagtatcggaagacatgacacgtttaacgctggatacaattggtctttgcggcttcaactatcgctttaacagcttttaccgagatcagcctcatccatttattgtgtcggcagtgcgtgcactggatgaagtaatgaacaagctgcagcgagcaaatccagacgacccagcttatgatgaaaacaagcgccagtgtcaagaagatatcaaggtgatgaacgactatgtcgataaaattattgcagatcgcaaagcaaggggtgaacaaagccatgatttattaacgcagatgctaaacggaaaagatccagaaacgggtgagccgcttgatgacgggaacattcgttatcaaattattacattcttaatcgcgggacacgaaacaacaagtggtcttttatcatttgcgctgtatttcttagtgaaaaatccacatgtattacaaaaagtagcagaagaagcagcacgagttctagtagatcctgttccaagctacaaacaagtcaaacagcttaaatatgtcggcatggtcttaaacgaagcgctgcgcttatggccaactggtcctgcgttttccctatatgcaaaagaagatacggtgcttggaggagaatatcctttaaccaaaggcgacgaagtaatggttctgattcctcagcttcaccgtgataaaacaatttggggagacgatgtggaggagttccgtccagagcgttttgaaaatccaagtgcgattccgcagcatgcgtttaaaccgtttggaaacggtcagcgtgcgtgtatcggtcagcagttcgctcttcatgaagcaacgctggtacttggtatgatgctaaaacactttgactttgaagatcatacaaactacgagctcgttattggcgaacgcttaacgttaaaacctgaaggctttgtggtaaaagcaaaatcgaaaggcattccgcttggcctgattccttcacctagcactgaacagtctgctaaaaaagtacgcaaaaaggcagaaaacgctcataatacgccgctgcttgtgctatacggttcaaatgcgggaacagctgaaggaacggcgcgtgatttagcagatattgcaatgagcaaaggatttgcaccgcaggtcgcaacgcttgattcacacgccggaaatcttccgcgcgaaggagctgtattaattgtaacggcgtcttataacggtcatccgcctgataacgcaaagcaatttgtcgactggttagaccaagcgtctgctgatgaagtaaaaggcgttcgctactccgtatttggatgcggcgataaaaactgggctgcgacgtatcaaaaagtgcctgcttttatcgatgaaacgcttgccgctaaaggggcagaaaacatcgctgaccgcggtgaagcagatgcaagcgacgactttgaaggcacgtatgaagaatggagtgatcatatgtggagtgacgtagcagcctactttaacctcgacattgaaaacagtgaagataataaatctactctttcacttcaatttgtcgacagcgccgcggatatgccgcttgcgaaaatgcacggtgcgttttcaacgaacgtcgtagcaagcaaagaacttcaacagccaggcagtgcacgaagcacgcgacatcttgaaattgaacttccaaaagaagcttcttatcaagaaggagatcatttaggtgttattcctcgcaactatgaaggaatagtaaaccgtgtaacagcaaggttcggcctaagcgcatcacagcaaatccgtctggaagcagaagaagaaaaattagctcatttgccactcgctaaaacagtatccgtagaagagcttctgcaatacgtggagcttcaagatcctgttacgcgcacgcagcttcgcgcaatggctgctaaaacggtctgcccgccgcataaagtagagcttgaagccttgcttgaaaagcaagcctacaaagaacaagtgctggcaaaacgtttaacaatgcttgaactgcttgaaaaatacccggcgtgtgaaatgaaattcagcgaatttatcgcccttctgccaagcatacgcccgcgctattactcgatttcttcatcacctcgtgtcgatgaaaaacaagcaagcatcacggtcagcgttgtctcaggaccggcgtggagcggatatggagaatataaaggaattgcgtcgaactatcttgccgagctgcaagaaggagatacgattacgtgctttatttccacagatcagtcagaatttacgctgccaaaagaccctgaaacgccgcttatcatggtcggaccgggaacaggcgtcgcgccgtttagaggctttgtgcaggcgcgcaaacagctaaaagaacaaggacagtcacttggagaagcacatttatacttcggctgccgttcacctcatgaagactatctgtatcaagaagagcttgaaaacgcccaaagcgaaggcatcattacgcttcataccgctttttctcgcatgccaaatcagccgaaaacatacgttcagcacgtaatggaacaagacggcaagaaattgattgaacttcttgatcaaggagcgcacttctatatttgcggagacggaagccaaatggcacctgccgttgaagcaacgcttatgaaaagctatgctgacgttcaccaagtgagtgaagcagacgctcgcttatggctgcagcagctagaagaaaaaggccgatacgcaaaagacgtgtgggctggg

SEQ ID NO: 480 - protein, 1049 aa, synthetic construct
  REGION 1..1049: note = Variant of cytochrome P450
MTIKEMPQPKTFGELKNLPLLNTDKPVQALMRIADELGEIFKFEAPGSVTRFLSSQRLIKEACDERRFDKNLSQSLKFGRDFLGDGLFTSWTHEPNWKKAHNILGPSFSQRAMKRYHAMMVDIAVQLVQKWERLNADEHIEVSEDMTRLTLDTIGLCGFNYRFNSFYRDQPHPFIVSAVRALDEVMNKLQRANPDDPAYDENKRQCQEDIKVMNDYVDKIIADRKARGEQSHDLLTQMLNGKDPETGEPLDDGNIRYQIITFLIAGHETTSGLLSFALYFLVKNPHVLQKVAEEAARVLVDPVPSYKQVKQLKYVGMVLNEALRLWPTGPAFSLYAKEDTVLGGEYPLTKGDEVMVLIPQLHRDKTIWGDDVEEFRPERFENPSAIPQHAFKPFGNGQRACIGQQFALHEATLVLGMMLKHFDFEDHTNYELVIGERLTLKPEGFVVKAKSKGIPLGLIPSPSTEQSAKKVRKKAENAHNTPLLVLYGSNAGTAEGTARDLADIAMSKGFAPQVATLDSHAGNLPREGAVLIVTASYNGHPPDNAKQFVDWLDQASADEVKGVRYSVFGCGDKNWAATYQKVPAFIDETLAAKGAENIADRGEADASDDFEGTYEEWSDHMWSDVAAYFNLDIENSEDNKSTLSLQFVDSAADMPLAKMHGAFSTNVVASKELQQPGSARSTRHLEIELPKEASYQEGDHLGVIPRNYEGIVNRVTARFGLSASQQIRLEAEEEKLAHLPLAKTVSVEELLQYVELQDPVTRTQLRAMAAKTVCPPHKVELEALLEKQAYKEQVLAKRLTMLELLEKYPACEMKFSEFIALLPSIRPRYYSISSSPRVDEKQASITVSVVSGPAWSGYGEYKGIASNYLAELQEGDTITCFISTDQSEFTLPKDPETPLIMVGPGTGVAPFRGFVQARKQLKEQGQSLGEAHLYFGCRSPHEDYLYQEELENAQSEGIITLHTAFSRMPNQPKTYVQHVMEQDGKKLIELLDQGAHFYICGDGSQMAPAVEATLMKSYADVHQVSEADARLWLQQLEEKGRYAKDVWAG

SEQ ID NO: 481 - DNA, 3147 bp, synthetic construct
  misc_feature 1..3147: note = Variant of cytochrome P450
  source 1..3147: mol_type = other DNA
atgacaattaaggaaatgcctcagcctaagacgtttggagaacttaaaaatttaccgttattaaacacagataaaccggttcaagctttgatgcgtattgcggatgaattaggagaaatctttaaattcgaggcgcctggtagcgtaacgcgctttttatcaagtcagcgtctaattaaagaagcatgcgatgaatcacgctttgataaaaacttaagtcaatcgctgaaatttgggcgtgattttctgggagacgggttatttacaagctggacgcatgaaccgaattggaaaaaagcgcataatatcttaggcccaagctttagtcagcgtgcaatgaaacgttatcatgcgatgatggtcgatatcgccgtgcagcttgttcaaaagtgggagcgtctaaatgcagatgagcatattgaagtatcggaagacatgacacgtttaacgctggatacaattggtctttgcggcttcaactatcgctttaacagcttttaccgagatcagcctcatccatttattgtgagtgttgtgcgtgcactggatgaagtaatgaacaagctgcagcgagcaaatccagacgacccagcttatgatgaaaacaagcgccagtgtcaagaagatatcaaggtgatgaacgactatgtcgataaaattattgcagatcgcaaagcaaggggtgaacaaagccatgatttattaacgcagatgctaaacggaaaagatccagaaacgggtgagccgcttgatgacgggaacattcgttatcaaattattacattcttaatcgcgggacacgaaacaacaagtggtcttttatcatttgcgctgtatttcttagtgaaaaatccacatgtattacaaaaagtagcagaagaagcagcacgagttctagtagatcctgttccaagctacaaacaagtcaaacagcttaaatatgtcggcatggtcttaaacgaagcgctgcgcttatggccaactggtcctgcgttttccctatatgcaaaagaagatacggtgcttggaggagaatatcctttaaccaaaggcgacgaagtaatggttctgattcctcagcttcaccgtgataaaacaatttggggagacgatgtggaggagttccgtccagagcgttttgaaaatccaagtgcgattccgcagcatgcgtttaaaccgtttggaaacggtcagcgtgcgtgtatcggtcagcagttcgctcttcatgaagcaacgctggtacttggtatgatgctaaaacactttgactttgaagatcatacaaactacgagctcgttattaaggaacgcttaacgttaaaacctgaaggctttgtggtaaaagcaaaatcgaaaggcattccgcttggcggcattccttcacctagcactgaacagtctgctaaaaaagtacgcaaaaaggcagaaaacgctcataatacgccgctgcttgtgctatacggttcaaatgcgggaacagctgaaggaacggcgcgtgatttagcagatattgcaatgagcaaaggatttgcaccgcaggtcgcaacgcttgattcacacgccggaaatcttccgcgcgaaggagctgtattaattgtaacggcgtcttataacggtcatccgcctgataacgcaaagcaatttgtcgactggttagaccaagcgtctgctgatgaagtaaaaggcgttcgctactccgtatttggatgcggcgataaaaactgggctgcgacgtatcaaaaagtgcctgcttttatcgatgaaacgcttgccgctaaaggggcagaaaacatcgctgaccgcggtgaagcagatgcaagcgacgactttgaaggcacgtatgaagaatggagtgatcatatttggagtgacgtagcagcctactttaacctcgacattgaaaacagtgaagataataaatctactctttcacttcaatttgtcgacagcgccgcggatatgccgcttgcgaaaatgcacggtgcgttttcaacgaacgtcgtagcaagcaaagaacttcaacagccaggcagtgcacgaagcacgcgacatcttgaaattgaacttccaaaagaagcttcttatcaagaaggagatcatttaggtgttattcctcgcaactatgaaggaatagtaaaccgtgtaacagcaaggttcggcctaagcgcatcacagcaaatccgtctggaagcagaagaagaaaaattagctcatttgccactcgctaaaacagtatccgtagaagagcttctgcaatacgtggagcttcaagatcctgttacgcgcacgcagcttcgcgcaatggctgctaaaacggtctgcccgccgcataaagtagagcttgaagccttgcttgaaaagcaagcctacaaagaacaagtgctggcaaaacgtttaacaatgcttgaactgcttgaaaaatacccggcgtgtgaaatgaaattcagcgaatttatcgcccttctgccaagcatacgcccgcgctattactcgatttcttcatcacctcgtgtcgatgaaaaacaagcaagcatcacggtcagcgttgtctcaggaccggcgtggagcggatatggagaatataaaggaattgcgtcgaactatcttgccgagctgcaagaaggagatacgattacgtgctttatttccacagatcagtcagaatttacgctgccaaaagaccctgaaacgccgcttatcatggtcggaccgggaacaggcgtcgcgccgtttagaggctttgtgcaggcgcgcaaacagctaaaagaacaaggacagtcacttggagaagcacatttatacttcggctgccgttcacctcatgaagactatctgtatcaagaagagcttgaaaacgcccaaagcgaaggcatcattacgcttcataccgctttttctcgcatgccaaatcagccgaaaacatacgttcagcacgtaatggaacaagacggcaagaaattgattgaacttcttgatcaaggagcgcacttctatatttgcggagacggaagccaaatggcacctgccgttgaagcaacgcttatgaaaagctatgctgacgttcaccaagtgagtgaagcagacgctcgcttatggctgcagcagctagaagaaaaaggccgatacgcaaaagacgtgtgggctggg

SEQ ID NO: 482 - protein, 1049 aa, synthetic construct
  REGION 1..1049: note = Variant of cytochrome P450
MTIKEMPQPKTFGELKNLPLLNTDKPVQALMRIADELGEIFKFEAPGSVTRFLSSQRLIKEACDESRFDKNLSQSLKFGRDFLGDGLFTSWTHEPNWKKAHNILGPSFSQRAMKRYHAMMVDIAVQLVQKWERLNADEHIEVSEDMTRLTLDTIGLCGFNYRFNSFYRDQPHPFIVSVVRALDEVMNKLQRANPDDPAYDENKRQCQEDIKVMNDYVDKIIADRKARGEQSHDLLTQMLNGKDPETGEPLDDGNIRYQIITFLIAGHETTSGLLSFALYFLVKNPHVLQKVAEEAARVLVDPVPSYKQVKQLKYVGMVLNEALRLWPTGPAFSLYAKEDTVLGGEYPLTKGDEVMVLIPQLHRDKTIWGDDVEEFRPERFENPSAIPQHAFKPFGNGQRACIGQQFALHEATLVLGMMLKHFDFEDHTNYELVIKERLTLKPEGFVVKAKSKGIPLGGIPSPSTEQSAKKVRKKAENAHNTPLLVLYGSNAGTAEGTARDLADIAMSKGFAPQVATLDSHAGNLPREGAVLIVTASYNGHPPDNAKQFVDWLDQASADEVKGVRYSVFGCGDKNWAATYQKVPAFIDETLAAKGAENIADRGEADASDDFEGTYEEWSDHIWSDVAAYFNLDIENSEDNKSTLSLQFVDSAADMPLAKMHGAFSTNVVASKELQQPGSARSTRHLEIELPKEASYQEGDHLGVIPRNYEGIVNRVTARFGLSASQQIRLEAEEEKLAHLPLAKTVSVEELLQYVELQDPVTRTQLRAMAAKTVCPPHKVELEALLEKQAYKEQVLAKRLTMLELLEKYPACEMKFSEFIALLPSIRPRYYSISSSPRVDEKQASITVSVVSGPAWSGYGEYKGIASNYLAELQEGDTITCFISTDQSEFTLPKDPETPLIMVGPGTGVAPFRGFVQARKQLKEQGQSLGEAHLYFGCRSPHEDYLYQEELENAQSEGIITLHTAFSRMPNQPKTYVQHVMEQDGKKLIELLDQGAHFYICGDGSQMAPAVEATLMKSYADVHQVSEADARLWLQQLEEKGRYAKDVWAG

SEQ ID NO: 483 - DNA, 3147 bp, synthetic construct
  misc_feature 1..3147: note = Variant of cytochrome P450
  source 1..3147: mol_type = other DNA
atgacaattaaggaaatgcctcagcctaagacgtttggagaacttaaaaatttaccgttattaaacacagataaaccggttcaagctttgatgcgtattgcggatgaattaggagaaatctttaaattcgaggcgcctggtagcgtaacgcgctttttatcaagtcagcgtctaattaaagaagcatgcgatgaatcacgctttgataaaaacttaagtcaatcgctgaaatttggccgtgattttctgggagacgggttatttacaagctggacgcatgaaccgaattggaaaaaagcgcataatatcttaggcccaagctttagtcagcgtgcaatgaaacgttatcatgcgatgatggtcgatatcgccgtgcagcttgttcaaaagtgggagcgtctaaatgcagatgagcatattgaagtatcggaagacatgacacgtttaacgctggatacaattggtctttgcggcttcaactatcgctttaacagcttttaccgagatcagcctcatccatttattgtgagtgttgtgcgtgcactggatgaagtaatgaacaagctgcagcgagcaaatccagacgacccagcttatgatgaaaacaagcgccagtttcaagaagatatcaaggtgatgaacgactatgtcgataaaattattgcagatcgcaaagcaaggggtgaacaaagccatgatttattaacgcagatgctaaacggaaaagatccagaaacgggtgagccgcttgatgacgggaacattcgttatcaaattattacattcttaatcgcgggacacgaaacaacaagtggtcttttatcatttgcgctgtatttcttagtgaaaaatccacatgtattacaaaaagtagcagaagaagcagcacgagttctagtagatcctgttccaagctacaaacaagtcaaacagcttaaatatgtcggcatggtcttaaacgaagcgctgcgcttatggccaactggtcctgcgttttccctatatgcaaaagaagatacggtgcttggaggagaatatcctttaaccaaaggcgacgaagtaatggttctgattcctcagcttcaccgtgataaaacaatttggggagacgatgtggaggagttccgtccagagcgttttgaaaatccaagtgcgattccgcagcatgcgtttaaaccgtttggaaacggtcagcgtgcgtgtatcggtcagcagttcgctcttcatgaagcaacgctggtacttggtatgatgctaaaacactttgactttgaagatcatacaaactacgagctcgttattggcgaacgcttaacgttaaaacctgaaggctttgtggtaaaagcaaaatcgaaaggcattccgcttggcggtattccttcacctagcactgaacagtctgctaaaaaagtacgcaaaaaggcagaaaacgctcataatacgccgctgcttgtgctatacggttcaaatgcgggaacagctgaaggaacggcgcgtgatttagcagatattgcaatgagcaaaggatttgcaccgcaggtcgcaacgcttgattcacacgccggaaatcttccgcgcgaaggagctgtattaattgtaacggcgtcttataacggtcatccgcctgataacgcaaagcaatttgtcgactggttagaccaagcgtctgctgatgaagtaaaaggcgttcgctactccgtatttggatgcggcgataaaaactgggctgcgacgtatcaaaaagtgcctgcttttatcgatgaaacgcttgccgctaaaggggcagaaaacatcgctgaccgcggtgaagcagatgcaagcgacgactttgaaggcacatatgaagaatggagtgatcatatgtggagtgacgtagcagcctactttaacctcgacattgaaaacagtgaagataataaatctactctttcacttcaatttgtcgacagcgccgcggatatgccgcttgcgaaaatgcacggtgcgttttcaacgaacgtcgtagcaagcaaagaacttcaacagccaggcagtgcacgaagcacgcgacatcttgaaattgaacttccaaaagaagcttcttatcaagaaggagatcatttaggtgttattcctcgcaactatgaaggaatagtaaaccgtgtaacagcaaggttcggcctaagcgcatcacagcaaatccgtctggaagcagaagaagaaaaattagctcatttgccactcgctaaaacagtatccgtagaagagcttctgcaatacgtggagcttcaagatcctgttacgcgcacgcagcttcgcgcaatggctgctaaaacggtctgcccgccgcataaagtagagcttgaagccttgcttgaaaagcaagcctacaaagaacaagtgctggcaaaacgtttaacaatgcttgaactgcttgaaaaatacccggcgtgtgaaatgaaattcagcgaatttatcgcccttctgccaagcatacgcccgcgctattactcgatttcttcatcacctcgtgtcgatgaaaaacaagcaagcatcacggtcagcgttgtctcaggaccggcgtggagcggatatggagaatataaaggaattgcgtcgaactatcttgccgagctgcaagaaggagatacgattacgtgctttatttccacagatcagtcagaatttacgctgccaaaagaccctgaaacgccgcttatcatggtcggaccgggaacaggcgtcgcgccgtttagaggctttgtgcaggcgcgcaaacagctaaaagaacaaggacagtcacttggagaagcacatttatacttcggctgccgttcacctcatgaagactatctgtatcaagaagagcttgaaaacgcccaaagcgaaggcatcattacgcttcataccgctttttctcgcatgccaaatcagccgaaaacatacgttcagcacgtaatggaacaagacggcaagaaattgattgaacttcttgatcaaggagcgcacttctatatttgcggagacggaagccaaatggcacctgccgttgaagcaacgcttatgaaaagctatgctgacgttcaccaagtgagtgaagcagacgctcgcttatggctgcagcagctagaagaaaaaggccgatacgcaaaagacgtgtgggctggg

SEQ ID NO: 484 - protein, 1049 aa, synthetic construct
  REGION 1..1049: note = Variant of cytochrome P450
MTIKEMPQPKTFGELKNLPLLNTDKPVQALMRIADELGEIFKFEAPGSVTRFLSSQRLIKEACDESRFDKNLSQSLKFGRDFLGDGLFTSWTHEPNWKKAHNILGPSFSQRAMKRYHAMMVDIAVQLVQKWERLNADEHIEVSEDMTRLTLDTIGLCGFNYRFNSFYRDQPHPFIVSVVRALDEVMNKLQRANPDDPAYDENKRQFQEDIKVMNDYVDKIIADRKARGEQSHDLLTQMLNGKDPETGEPLDDGNIRYQIITFLIAGHETTSGLLSFALYFLVKNPHVLQKVAEEAARVLVDPVPSYKQVKQLKYVGMVLNEALRLWPTGPAFSLYAKEDTVLGGEYPLTKGDEVMVLIPQLHRDKTIWGDDVEEFRPERFENPSAIPQHAFKPFGNGQRACIGQQFALHEATLVLGMMLKHFDFEDHTNYELVIGERLTLKPEGFVVKAKSKGIPLGGIPSPSTEQSAKKVRKKAENAHNTPLLVLYGSNAGTAEGTARDLADIAMSKGFAPQVATLDSHAGNLPREGAVLIVTASYNGHPPDNAKQFVDWLDQASADEVKGVRYSVFGCGDKNWAATYQKVPAFIDETLAAKGAENIADRGEADASDDFEGTYEEWSDHMWSDVAAYFNLDIENSEDNKSTLSLQFVDSAADMPLAKMHGAFSTNVVASKELQQPGSARSTRHLEIELPKEASYQEGDHLGVIPRNYEGIVNRVTARFGLSASQQIRLEAEEEKLAHLPLAKTVSVEELLQYVELQDPVTRTQLRAMAAKTVCPPHKVELEALLEKQAYKEQVLAKRLTMLELLEKYPACEMKFSEFIALLPSIRPRYYSISSSPRVDEKQASITVSVVSGPAWSGYGEYKGIASNYLAELQEGDTITCFISTDQSEFTLPKDPETPLIMVGPGTGVAPFRGFVQARKQLKEQGQSLGEAHLYFGCRSPHEDYLYQEELENAQSEGIITLHTAFSRMPNQPKTYVQHVMEQDGKKLIELLDQGAHFYICGDGSQMAPAVEATLMKSYADVHQVSEADARLWLQQLEEKGRYAKDVWAG

SEQ ID NO: 485 - DNA, 3147 bp, synthetic construct
  misc_feature 1..3147: note = Variant of cytochrome P450
  source 1..3147: mol_type = other DNA
atgacaattaaggaaatgcctcagcctaagacgtttggagaacttaaaaatttaccgttattaaacacagataaaccggttcaagctttgatgcgtattgcggatgaattaggagaaatctttaaattcgaggcgcctggtagcgtaacgcgctttttatcaagtcagcgtctaattaaagaagcatgcgatgaatcacgctttgataaaaacttaagtcaatcgctgaaatttgcccgtgattttctgggagacgggttatttacaagctggacgcatgaaccgaattggaaaaaagcgcataatatcttaggcccaagctttagtcagcgtgcaatgaaacgttatcatgcgatgatggtcgatatcgccgtgcagcttgttcaaaagtgggagcgtctaaatgcagatgagcatattgaagtatcggaagacatgacacgtttaacgctggatacaattggtctttgcggcttcaactatcgctttaacagcttttaccgagatcagcctcatccatttattgtgagtgttgtgcgtgcactggatgaagtaatgaacaagctgcagcgagcaaatccagacgacccagcttatgatgaaaacaagcgccagtgtcaagaagatatcaaggtgatgaacgactatgtcgataaaattattgcagatcgcaaagcaaggggtgaacaaagccatgatttattaacgcagatgctaaacggaaaagatccagaaacgggtgagccgcttgatgacgggaacattcgttatcaaattattacattcttaatcgcgggacacgaaacaacaagtggtcttttatcatttgcgctgtatttcttagtgaaaaatccacatgtattacaaaaagtagcagaagaagcagcacgagttctagtagatcctgttccaagctacaaacaagtcaaacagcttaaatatgtcggcatggtcttaaacgaagcgctgcgcttatggccaactggtcctgcgttttccctatatgcaaaagaagatacggtgcttggaggagaatatcctttaaccaaaggcgacgaagtaatggttctgattcctcagcttcaccgtgataaaacaatttggggagacgatgtggaggagttccgtccagagcgttttgaaaatccaagtgcgattccgcagcatgcgtttaaaccgtttggaaacggtcagcgtgcgtgtatcggtcagcagttcgctcttcatgaagcaacgctggtacttggtatgatgctaaaacactttgactttgaagatcatacaaactacgagctcgttattaaagaaaagttaacgttaaaacctgaaggctttgtggtaaaagcaaaatcgaaaggcattccgcttggcggtattccttcacctagcactgaacagtctgctaaaaaagtacgcaaaaaggcagaaaacgctcataatacgccgctgcttgtgctatacggttcaaatgcgggaacagctgaaggaacggcgcgtgatttagcagatattgcaatgagcaaaggatttgcaccgcaggtcgcaacgcttgattcacacgccggaaatcttccgcgcgaaggagctgtattaattgtaacggcgtcttataacggtcatccgcctgataacgcaaagcaatttgtcgactggttagaccaagcgtctgctgatgaagtaaaaggcgttcgctactccgtatttggatgcggcgataaaaactgggctgcgacgtatcaaaaagtgcctgcttttatcgatgaaacgcttgccgctaaaggggcagaaaacatcgctgaccgcggtgaagcagatgcaagcgacgactttgaaggcacgtatgaagaatggagtgatcatatgtggagtgacgtagcagcctactttaacctcgacattgaaaacagtgaagataataaatctactctttcacttcaatttgtcgacagcgccgcggatatgccgcttgcgaaaatgcacggtgcgttttcaacgaacgtcgtagcaagcaaagaacttcaacagccaggcagtgcacgaagcacgcgacatcttgaaattgaacttccaaaagaagcttcttatcaagaaggagatcatttaggtgttattcctcgcaactatgaaggaatagtaaaccgtgtaacagcaaggttcggcctaagcgcatcacagcaaatccgtctggaagcagaagaagaaaaattagctcatttgccactcgctaaaacagtatccgtagaagagcttctgcaatacgtggagcttcaagatcctgttacgcgcacgcagcttcgcgcaatggctgctaaaacggtctgcccgccgcataaagtagagcttgaagccttgcttgaaaagcaagcctacaaagaacaagtgctggcaaaacgtttaacaatgcttgaactgcttgaaaaatacccggcgtgtgaaatgaaattcagcgaatttatcgcccttctgccaagcatacgcccgcgctattactcgatttcttcatcacctcgtgtcgatgaaaaacaagcaagcatcacggtcagcgttgtctcaggaccggcgtggagcggatatggagaatataaaggaattgcgtcgaactatcttgccgagctgcaagaaggagatacgattacgtgctttatttccacagatcagtcagaatttacgctgccaaaagaccctgaaacgccgcttatcatggtcggaccgggaacaggcgtcgcgccgtttagaggctttgtgcaggcgcgcaaacagctaaaagaacaaggacagtcacttggagaagcacatttatacttcggctgccgttcacctcatgaagactatctgtatcaagaagagcttgaaaacgcccaaagcgaaggcatcattacgcttcataccgctttttctcgcatgccaaatcagccgaaaacatacgttcagcacgtaatggaacaagacggcaagaaattgattgaacttcttgatcaaggagcgcacttctatatttgcggagacggaagccaaatggcacctgccgttgaagcaacgcttatgaaaagctatgctgacgttcaccaagtgagtgaagcagacgctcgcttatggctgcagcagctagaagaaaaaggccgatacgcaaaagacgtgtgggctggg

SEQ ID NO: 486 - protein, 1049 aa, synthetic construct
  REGION 1..1049: note = Variant of cytochrome P450
MTIKEMPQPKTFGELKNLPLLNTDKPVQALMRIADELGEIFKFEAPGSVTRFLSSQRLIKEACDESRFDKNLSQSLKFARDFLGDGLFTSWTHEPNWKKAHNILGPSFSQRAMKRYHAMMVDIAVQLVQKWERLNADEHIEVSEDMTRLTLDTIGLCGFNYRFNSFYRDQPHPFIVSVVRALDEVMNKLQRANPDDPAYDENKRQCQEDIKVMNDYVDKIIADRKARGEQSHDLLTQMLNGKDPETGEPLDDGNIRYQIITFLIAGHETTSGLLSFALYFLVKNPHVLQKVAEEAARVLVDPVPSYKQVKQLKYVGMVLNEALRLWPTGPAFSLYAKEDTVLGGEYPLTKGDEVMVLIPQLHRDKTIWGDDVEEFRPERFENPSAIPQHAFKPFGNGQRACIGQQFALHEATLVLGMMLKHFDFEDHTNYELVIKEKLTLKPEGFVVKAKSKGIPLGGIPSPSTEQSAKKVRKKAENAHNTPLLVLYGSNAGTAEGTARDLADIAMSKGFAPQVATLDSHAGNLPREGAVLIVTASYNGHPPDNAKQFVDWLDQASADEVKGVRYSVFGCGDKNWAATYQKVPAFIDETLAAKGAENIADRGEADASDDFEGTYEEWSDHMWSDVAAYFNLDIENSEDNKSTLSLQFVDSAADMPLAKMHGAFSTNVVASKELQQPGSARSTRHLEIELPKEASYQEGDHLGVIPRNYEGIVNRVTARFGLSASQQIRLEAEEEKLAHLPLAKTVSVEELLQYVELQDPVTRTQLRAMAAKTVCPPHKVELEALLEKQAYKEQVLAKRLTMLELLEKYPACEMKFSEFIALLPSIRPRYYSISSSPRVDEKQASITVSVVSGPAWSGYGEYKGIASNYLAELQEGDTITCFISTDQSEFTLPKDPETPLIMVGPGTGVAPFRGFVQARKQLKEQGQSLGEAHLYFGCRSPHEDYLYQEELENAQSEGIITLHTAFSRMPNQPKTYVQHVMEQDGKKLIELLDQGAHFYICGDGSQMAPAVEATLMKSYADVHQVSEADARLWLQQLEEKGRYAKDVWAG

SEQ ID NO: 487 - DNA, 3147 bp, synthetic construct
  misc_feature 1..3147: note = Variant of cytochrome P450
  source 1..3147: mol_type = other DNA
atgacaattaaggaaatgcctcagcctaagacgtttggagaacttaaaaatttaccgttattaaacacagataaaccggttcaagctttgatgcgtattgcggatgaattaggagaaatctttaaattcgaggcgcctggtagcgtaacgcgctttttatcaagtcagcgtctaattaaagaagcatgcgatgaatcacgctttgataaaaacttaagtcaatcgctgaaatttgcccgtgattttctgggagacgggttatttacaagctggacgcatgaaccgaattggaaaaaagcgcataatatcttaggcccaagctttagtcagcgtgcaatgaaacgttatcatgcgatgatggtcgatatcgccgtgcagcttgttcaaaagtgggagcgtctaaatgcagatgagcatattgaagtatcggaagacatgacacgtttaacgctggatacaattggtctttgcggcttcaactatcgctttaacagcttttaccgagatcagcctcatccatttattgtgagtgttgtgcgtgcactggatgaagtaatgaacaagctgcagcgagcaaatccagacgacccagcttatgatgaaaacaagcgccagtttcaagaagatatcaaggtggctaacgactatgtcgataaaattattgcagatcgcaaagcaaggggtgaacaaagccatgatttattaacgcagatgctaaacggaaaagatccagaaacgggtgagccgcttgatgacgggaacattcgttatcaaattattacattcttaatcgcgggacacgaaacaacaagtggtcttttatcatttgcgctgtatttcttagtgaaaaatccacatgtattacaaaaagtagcagaagaagcagcacgagttctagtagatcctgttccaagctacaaacaagtcaaacagcttaaatatgtcggcatggtcttaaacgaagcgctgcgcttatggccaactggtcctgcgttttccctatatgcaaaagaagatacggtgcttggaggagaatatcctttaaccaaaggcgacgaagtaatggttctgattcctcagcttcaccgtgataaaacaatttggggagacgatgtggaggagttccgtccagagcgttttgaaaatccaagtgcgattccgcagcatgcgtttaaaccgtttggaaacggtcagcgtgcgtgtatcggtcagcagttcgctcttcatgaagcaacgctggtacttggtatgatgctaaaacactttgactttgaagatcatacaaactacgagctcgttattaaggaacgcttaacgttaaaacctgaaggctttgtggtaaaagcaaaatcgaaaggcattccgcttggcggcattccttcacctagcactgaacagtctgctaaaaaagtacgcaaaaaggcagaaaacgctcataatacgccgctgcttgtgctatacggttcaaatgcgggaacagctgaaggaacggcgcgtgatttagcagatattgcaatgagcaaaggatttgcaccgcaggtcgcaacgcttgattcacacgccggaaatcttccgcgcgaaggagctgtattaattgtaacggcgtcttataacggtcatccgcctgataacgcaaagcaatttgtcgactggttagaccaagcgtctgctgatgaagtaaaaggcgttcgctactccgtatttggatgcggcgataaaaactgggctgcgacgtatcaaaaagtgcctgcttttatcgatgaaacgcttgccgctaaaggggcagaaaacatcgctgaccgcggtgaagcagatgcaagcgacgactttgaaggcgcgtatgaagaatggagtgatcatatgtggagtgacgtagcagcctactttaacctcgacattgaaaacagtgaagataataaatctactctttcacttcaatttgtcgacagcgccgcggatatgccgcttgcgaaaatgcacggtgcgttttcaacgaacgtcgtagcaagcaaagaacttcaacagccaggcagtgcacgaagcacgcgacatcttgaaattgaacttccaaaagaagcttcttatcaagaaggagatcatttaggtgttattcctcgcaactatgaaggaatagtaaaccgtgtaacagcaaggttcggcctaagcgcatcacagcaaatccgtctggaagcagaagaagaaaaattagctcatttgccactcgctaaaacagtatccgtagaagagcttctgcaatacgtggagcttcaagatcctgttacgcgcacgcagcttcgcgcaatggctgctaaaacggtctgcccgccgcataaagtagagcttgaagccttgcttgaaaagcaagcctacaaagaacaagtgctggcaaaacgtttaacaatgcttgaactgcttgaaaaatacccggcgtgtgaaatgaaattcagcgaatttatcgcccttctgccaagcatacgcccgcgctattactcgatttcttcatcacctcgtgtcgatgaaaaacaagcaagcatcacggtcagcgttgtctcaggaccggcgtggagcggatatggagaatataaaggaattgcgtcgaactatcttgccgagctgcaagaaggagatacgattacgtgctttatttccacagatcagtcagaatttacgctgccaaaagaccctgaaacgccgcttatcatggtcggaccgggaacaggcgtcgcgccgtttagaggctttgtgcaggcgcgcaaacagctaaaagaacaaggacagtcacttggagaagcacatttatacttcggctgccgttcacctcatgaagactatctgtatcaagaagagcttgaaaacgcccaaagcgaaggcatcattacgcttcataccgctttttctcgcatgccaaatcagccgaaaacatacgttcagcacgtaatggaacaagacggcaagaaattgattgaacttcttgatcaaggagcgcacttctatatttgcggagacggaagccaaatggcacctgccgttgaagcaacgcttatgaaaagctatgctgacgttcaccaagtgagtgaagcagacgctcgcttatggctgcagcagctagaagaaaaaggccgatacgcaaaagacgtgtgggctggg

SEQ ID NO: 488 - protein, 1049 aa, synthetic construct
  REGION 1..1049: note = Variant of cytochrome P450
MTIKEMPQPKTFGELKNLPLLNTDKPVQALMRIADELGEIFKFEAPGSVTRFLSSQRLIKEACDESRFDKNLSQSLKFARDFLGDGLFTSWTHEPNWKKAHNILGPSFSQRAMKRYHAMMVDIAVQLVQKWERLNADEHIEVSEDMTRLTLDTIGLCGFNYRFNSFYRDQPHPFIVSVVRALDEVMNKLQRANPDDPAYDENKRQFQEDIKVANDYVDKIIADRKARGEQSHDLLTQMLNGKDPETGEPLDDGNIRYQIITFLIAGHETTSGLLSFALYFLVKNPHVLQKVAEEAARVLVDPVPSYKQVKQLKYVGMVLNEALRLWPTGPAFSLYAKEDTVLGGEYPLTKGDEVMVLIPQLHRDKTIWGDDVEEFRPERFENPSAIPQHAFKPFGNGQRACIGQQFALHEATLVLGMMLKHFDFEDHTNYELVIKERLTLKPEGFVVKAKSKGIPLGGIPSPSTEQSAKKVRKKAENAHNTPLLVLYGSNAGTAEGTARDLADIAMSKGFAPQVATLDSHAGNLPREGAVLIVTASYNGHPPDNAKQFVDWLDQASADEVKGVRYSVFGCGDKNWAATYQKVPAFIDETLAAKGAENIADRGEADASDDFEGAYEEWSDHMWSDVAAYFNLDIENSEDNKSTLSLQFVDSAADMPLAKMHGAFSTNVVASKELQQPGSARSTRHLEIELPKEASYQEGDHLGVIPRNYEGIVNRVTARFGLSASQQIRLEAEEEKLAHLPLAKTVSVEELLQYVELQDPVTRTQLRAMAAKTVCPPHKVELEALLEKQAYKEQVLAKRLTMLELLEKYPACEMKFSEFIALLPSIRPRYYSISSSPRVDEKQASITVSVVSGPAWSGYGEYKGIASNYLAELQEGDTITCFISTDQSEFTLPKDPETPLIMVGPGTGVAPFRGFVQARKQLKEQGQSLGEAHLYFGCRSPHEDYLYQEELENAQSEGIITLHTAFSRMPNQPKTYVQHVMEQDGKKLIELLDQGAHFYICGDGSQMAPAVEATLMKSYADVHQVSEADARLWLQQLEEKGRYAKDVWAG

SEQ ID NO: 489 - DNA, 3147 bp, synthetic construct
  misc_feature 1..3147: note = Variant of cytochrome P450
  source 1..3147: mol_type = other DNA
atgacaattaaggaaatgcctcagcctaagacgtttggagaacttaaaaatttaccgttattaaacacagataaaccggttcaagctttgatgcgtattgcggatgaattaggagaaatctttaaattcgaggcgcctggtagcgtaacgcgctttttatcaagtcagcgtctaattaaagaagcatgcgatgaacgtcgctttgataaaaacttaagtcaatcgctgaaatttgcccgtgattttctgggagacgggttatttacaagctggacgcatgaaccgaattggaaaaaagcgcataatatcttaggcccaagctttagtcagcgtgcaatgaaacgttatcatgcgatgatggtcgatatcgccgtgcagcttgttcaaaagtgggagcgtctaaatgcagatgagcatattgaagtatcggaagacatgacacgtttaacgctggatacaattggtctttgcggcttcaactatcgctttaacagcttttaccgagatcagcctcatccatttattgtgagtgttgtgcgtgcactggatgaagtcatgaacaagctgcagcgagcaaatccagacgacccagcttatgatgaaaacaagcgccagtgtcaagaagctgccaaggtgatgaacgactatgtcgataaaattattgcagatcgcaaagcaaggggtgaacaaagccatgatttattaacgcagatgctaaacggaaaagatccagaaacgggtgagccgcttgatgacgggaacattcgttatcaaattattacattcttaatcgcgggacacgaaacaacaagtggtcttttatcatttgcgctgtatttcttagtgaaaaatccacatgtattacaaaaagtagcagaagaagcagcacgagttctagtagatcctgttccaagctacaaacaagtcaaacagcttaaatatgtcggcatggtcttaaacgaagcgctgcgcttatggccaactggtcctgcgttttccctatatgcaaaagaagatacggtgcttggaggagaatatcctttaaccaaaggcgacgaagtaatggttctgattcctcagcttcaccgtgataaaacaatttggggagacgatgtggaggagttccgtccagagcgttttgaaaatccaagtgcgattccgcagcatgcgtttaaaccgtttggaaacggtcagcgtgcgtgtatcggtcagcagttcgctcttcatgaagcaacgctggtacttggtatgatgctaaaacactttgactttgaagatcatacaaactacgagctcgttattaaggaacgcttaacgttaaaacctgaaggctttgtggtaaaagcaaaatcgaaaggcattccgcttggcggtattccttcacctagcactgaacagtctgctaaaaaagtacgcaaaaaggcagaaaacgctcataatacgccgctgcttgtgctatacggttcaaatgcgggaacagctgaaggaacggcgcgtgatttagcagatattgcaatgagcaaaggatttgcaccgcaggtcgcaacgcttgattcacacgccggaaatcttccgcgcgaaggagctgtattaattgtaacggcgtcttataacggtcatccgcctgataacgcaaagcaatttgtcgactggttagaccaagcgtctgctgatgaagtaaaaggcgttcgctactccgtatttggatgcggcgataaaaactgggctgcgacgtatcaaaaagtgcctgcttttatcgatgaaacgcttgccgctaaaggggcagaaaacatcgctgaccgcggtgaagcagatgcaagcgacgactttgaaggcgcgtatgaagaatggagtgatcatatgtggagtgacgtagcagcctactttaacctcgacattgaaaacagtgaagataataaatctactctttcacttcaatttgtcgacagcgccgcggatatgccgcttgcgaaaatgcacggtgcgttttcaacgaacgtcgtagcaagcaaagaacttcaacagccaggcagtgcacgaagcacgcgacatcttgaaattgaacttccaaaagaagcttcttatcaagaaggagatcatttaggtgttattcctcgcaactatgaaggaatagtaaaccgtgtaacagcaaggttcggcctaagcgcatcacagcaaatccgtctggaagcagaagaagaaaaattagctcatttgccactcgctaaaacagtatccgtagaagagcttctgcaatacgtggagcttcaagatcctgttacgcgcacgcagcttcgcgcaatggctgctaaaacggtctgcccgccgcataaagtagagcttgaagccttgcttgaaaagcaagcctacaaagaacaagtgctggcaaaacgtttaacaatgcttgaactgcttgaaaaatacccggcgtgtgaaatgaaattcagcgaatttatcgcccttctgccaagcatacgcccgcgctattactcgatttcttcatcacctcgtgtcgatgaaaaacaagcaagcatcacggtcagcgttgtctcaggaccggcgtggagcggatatggagaatataaaggaattgcgtcgaactatcttgccgagctgcaagaaggagatacgattacgtgctttatttccacagatcagtcagaatttacgctgccaaaagaccctgaaacgccgcttatcatggtcggaccgggaacaggcgtcgcgccgtttagaggctttgtgcaggcgcgcaaacagctaaaagaacaaggacagtcacttggagaagcacatttatacttcggctgccgttcacctcatgaagactatctgtatcaagaagagcttgaaaacgcccaaagcgaaggcatcattacgcttcataccgctttttctcgcatgccaaatcagccgaaaacatacgttcagcacgtaatggaacaagacggcaagaaattgattgaacttcttgatcaaggagcgcacttctatatttgcggagacggaagccaaatggcacctgccgttgaagcaacgcttatgaaaagctatgctgacgttcaccaagtgagtgaagcagacgctcgcttatggctgcagcagctagaagaaaaaggccgatacgcaaaagacgtgtgggctggg

SEQ ID NO: 490 - protein, 1049 aa, synthetic construct
  REGION 1..1049: note = Variant of cytochrome P450
MTIKEMPQPKTFGELKNLPLLNTDKPVQALMRIADELGEIFKFEAPGSVTRFLSSQRLIKEACDERRFDKNLSQSLKFARDFLGDGLFTSWTHEPNWKKAHNILGPSFSQRAMKRYHAMMVDIAVQLVQKWERLNADEHIEVSEDMTRLTLDTIGLCGFNYRFNSFYRDQPHPFIVSVVRALDEVMNKLQRANPDDPAYDENKRQCQEAAKVMNDYVDKIIADRKARGEQSHDLLTQMLNGKDPETGEPLDDGNIRYQIITFLIAGHETTSGLLSFALYFLVKNPHVLQKVAEEAARVLVDPVPSYKQVKQLKYVGMVLNEALRLWPTGPAFSLYAKEDTVLGGEYPLTKGDEVMVLIPQLHRDKTIWGDDVEEFRPERFENPSAIPQHAFKPFGNGQRACIGQQFALHEATLVLGMMLKHFDFEDHTNYELVIKERLTLKPEGFVVKAKSKGIPLGGIPSPSTEQSAKKVRKKAENAHNTPLLVLYGSNAGTAEGTARDLADIAMSKGFAPQVATLDSHAGNLPREGAVLIVTASYNGHPPDNAKQFVDWLDQASADEVKGVRYSVFGCGDKNWAATYQKVPAFIDETLAAKGAENIADRGEADASDDFEGAYEEWSDHMWSDVAAYFNLDIENSEDNKSTLSLQFVDSAADMPLAKMHGAFSTNVVASKELQQPGSARSTRHLEIELPKEASYQEGDHLGVIPRNYEGIVNRVTARFGLSASQQIRLEAEEEKLAHLPLAKTVSVEELLQYVELQDPVTRTQLRAMAAKTVCPPHKVELEALLEKQAYKEQVLAKRLTMLELLEKYPACEMKFSEFIALLPSIRPRYYSISSSPRVDEKQASITVSVVSGPAWSGYGEYKGIASNYLAELQEGDTITCFISTDQSEFTLPKDPETPLIMVGPGTGVAPFRGFVQARKQLKEQGQSLGEAHLYFGCRSPHEDYLYQEELENAQSEGIITLHTAFSRMPNQPKTYVQHVMEQDGKKLIELLDQGAHFYICGDGSQMAPAVEATLMKSYADVHQVSEADARLWLQQLEEKGRYAKDVWAG

SEQ ID NO: 491 - DNA, 3147 bp, synthetic construct
  misc_feature 1..3147: note = Variant of cytochrome P450
  source 1..3147: mol_type = other DNA
atgacaattaaggaaatgcctcagcctaagacgtttggagaacttaaaaatttaccgttattaaacacagataaaccggttcaagctttgatgcgtattgcggatgaattaggagaaatctttaaattcgaggcgcctggtagcgtaacgcgctttttatcaagtcagcgtctaattaaagaagcatgcgatgaacgtcgctttgataaaaacttaagtcaatcgctgaaatttggccgtgattttctgggagacgggttatttacaagctggacgcatgaaccgaattggaaaaaagcgcataatatcttaggcccaagctttagtcagcgtgcaatgaaacgttatcatgcgatgatggtcgatatcgccgtgcagcttgttcaaaagtgggagcgtctaaatgcagatgagcatattgaagtatcggaagacatgacacgtttaacgctggatacaattggtctttgcggcttcaactatcgctttaacagcttttaccgagatcagcctcatccatttattgtgagtgttgtgcgtgcactggatgaagtaatgaacaagctgcagcgagcaaatccagacgacccagcttatgatgaaaacaagcgccagtgtcaagaagatatcaaggtgatgaacgactatgtcgataaaattattgcagatcgcaaagcaaggggtgaacaaagccatgatttattaacgcagatgctaaacggaaaagatccagaaacgggtgagccgcttgatgacgggaacattcgttatcaaattattacattcttaatcgcgggacacgaaacaacaagtggtcttttatcatttgcgctgtatttcttagtgaaaaatccacatgtattacaaaaagtagcagaagaagcagcacgagttctagtagatcctgttccaagctacaaacaagtcaaacagcttaaatatgtcggcatggtcttaaacgaagcgctgcgcttatggccaactggtcctgcgttttccctatatgcaaaagaagatacggtgcttggaggagaatatcctttaaccaaaggcgacgaagtaatggttctgattcctcagcttcaccgtgataaaacaatttggggagacgatgtggaggagttccgtccagagcgttttgaaaatccaagtgcgattccgcagcatgcgtttaaaccgtttggaaacggtcagcgtgcgtgtatcggtcagcagttcgctcttcatgaagcaacgctggtacttggtatgatgctaaaacactttgactttgaagatcatacaaactacgagctcgttattaaggaaaaattaacgttaaaacctgaaggctttgtggtaaaagcaaaatcgaaaggcattccgcttggcctgattccttcacctagcactgaacagtctgctaaaaaagtacgcaaaaaggcagaaaacgctcataatacgccgctgcttgtgctatacggttcaaatgcgggaacagctgaaggaacggcgcgtgatttagcagatattgcaatgagcaaaggatttgcaccgcaggtcgcaacgcttgattcacacgccggaaatcttccgcgcgaaggagctgtattaattgtaacggcgtcttataacggtcatccgcctgataacgcaaagcaatttgtcgactggttagaccaagcgtctgctgatgaagtaaaaggcgttcgctactccgtatttggatgcggcgataaaaactgggctgcgacgtatcaaaaagtgcctgcttttatcgatgaaacgcttgccgctaaaggggcagaaaacatcgctgaccgcggtgaagcagatgcaagcgacgactttgaaggcacgtatgaagaatggagtgatcatatgtggagtgacgtagcagcctactttaacctcgacattgaaaacagtgaagataataaatctactctttcacttcaatttgtcgacagcgccgcggatatgccgcttgcgaaaatgcacggtgcgttttcaacgaacgtcgtagcaagcaaagaacttcaacagccaggcagtgcacgaagcacgcgacatcttgaaattgaacttccaaaagaagcttcttatcaagaaggagatcatttaggtgttattcctcgcaactatgaaggaatagtaaaccgtgtaacagcaaggttcggcctaagcgcatcacagcaaatccgtctggaagcagaagaagaaaaattagctcatttgccactcgctaaaacagtatccgtagaagagcttctgcaatacgtggagcttcaagatcctgttacgcgcacgcagcttcgcgcaatggctgctaaaacggtctgcccgccgcataaagtagagcttgaagccttgcttgaaaagcaagcctacaaagaacaagtgctggcaaaacgtttaacaatgcttgaactgcttgaaaaatacccggcgtgtgaaatgaaattcagcgaatttatcgcccttctgccaagcatacgcccgcgctattactcgatttcttcatcacctcgtgtcgatgaaaaacaagcaagcatcacggtcagcgttgtctcaggaccggcgtggagcggatatggagaatataaaggaattgcgtcgaactatcttgccgagctgcaagaaggagatacgattacgtgctttatttccacagatcagtcagaatttacgctgccaaaagaccctgaaacgccgcttatcatggtcggaccgggaacaggcgtcgcgccgtttagaggctttgtgcaggcgcgcaaacagctaaaagaacaaggacagtcacttggagaagcacatttatacttcggctgccgttcacctcatgaagactatctgtatcaagaagagcttgaaaacgcccaaagcgaaggcatcattacgcttcataccgctttttctcgcatgccaaatcagccgaaaacatacgttcagcacgtaatggaacaagacggcaagaaattgattgaacttcttgatcaaggagcgcacttctatatttgcggagacggaagccaaatggcacctgccgttgaagcaacgcttatgaaaagctatgctgacgttcaccaagtgagtgaagcagacgctcgcttatggctgcagcagctagaagaaaaaggccgatacgcaaaagacgtgtgggctggg

SEQ ID NO: 492 - protein, 1049 aa, synthetic construct
  REGION 1..1049: note = Variant of cytochrome P450
MTIKEMPQPKTFGELKNLPLLNTDKPVQALMRIADELGEIFKFEAPGSVTRFLSSQRLIKEACDERRFDKNLSQSLKFGRDFLGDGLFTSWTHEPNWKKAHNILGPSFSQRAMKRYHAMMVDIAVQLVQKWERLNADEHIEVSEDMTRLTLDTIGLCGFNYRFNSFYRDQPHPFIVSVVRALDEVMNKLQRANPDDPAYDENKRQCQEDIKVMNDYVDKIIADRKARGEQSHDLLTQMLNGKDPETGEPLDDGNIRYQIITFLIAGHETTSGLLSFALYFLVKNPHVLQKVAEEAARVLVDPVPSYKQVKQLKYVGMVLNEALRLWPTGPAFSLYAKEDTVLGGEYPLTKGDEVMVLIPQLHRDKTIWGDDVEEFRPERFENPSAIPQHAFKPFGNGQRACIGQQFALHEATLVLGMMLKHFDFEDHTNYELVIKEKLTLKPEGFVVKAKSKGIPLGLIPSPSTEQSAKKVRKKAENAHNTPLLVLYGSNAGTAEGTARDLADIAMSKGFAPQVATLDSHAGNLPREGAVLIVTASYNGHPPDNAKQFVDWLDQASADEVKGVRYSVFGCGDKNWAATYQKVPAFIDETLAAKGAENIADRGEADASDDFEGTYEEWSDHMWSDVAAYFNLDIENSEDNKSTLSLQFVDSAADMPLAKMHGAFSTNVVASKELQQPGSARSTRHLEIELPKEASYQEGDHLGVIPRNYEGIVNRVTARFGLSASQQIRLEAEEEKLAHLPLAKTVSVEELLQYVELQDPVTRTQLRAMAAKTVCPPHKVELEALLEKQAYKEQVLAKRLTMLELLEKYPACEMKFSEFIALLPSIRPRYYSISSSPRVDEKQASITVSVVSGPAWSGYGEYKGIASNYLAELQEGDTITCFISTDQSEFTLPKDPETPLIMVGPGTGVAPFRGFVQARKQLKEQGQSLGEAHLYFGCRSPHEDYLYQEELENAQSEGIITLHTAFSRMPNQPKTYVQHVMEQDGKKLIELLDQGAHFYICGDGSQMAPAVEATLMKSYADVHQVSEADARLWLQQLEEKGRYAKDVWAG

SEQ ID NO: 493 - DNA, 3147 bp, synthetic construct
  misc_feature 1..3147: note = Variant of cytochrome P450
  source 1..3147: mol_type = other DNA
atgacaattaaggaaatgcctcagcctaagacgtttggagaacttaaaaatttaccgttattaaacacagataaaccggttcaagctttgatgcgtattgcggatgaattaggagaaatctttaaattcgaggcgcctggtagcgtaacgcgctttttatcaagtcagcgtctaattaaagaagcatgcgatgaacgtcgctttgataaaaacttaagtcaatcgctgaaatttgcccgtgattttctgggagacgggttatttacaagctggacgcatgaaccgaattggaaaaaagcgcataatatcttaggcccaagctttagtcagcatgcaatgcgccgttatcatgcgatgatggtcgatatcgccgtgcagcttgttcaaaagtgggagcgtctaaatgcagatgagcatattgaagtatcggaagacatgacacgtttaacgctggatacaattggtctttgcggcttcaactatcgctttaacagcttttaccgagatcagcctcatccatttattgtgtcggtagtgcgtctgctggatgaaatcatgaacaagctgcagcgagcaaatccagacgacccagcttatgatgaaaacaagcgccagtgccaagaagatatcaaggtgatgaacgactatgtcgataaaattattgcagatcgcaaagcaaggggtgaacaaagccatgatttattaacgcagatgctaaacggaaaagatccagaaacgggtgagccgcttgatgacgggaacattcgttatcaaattattacattcttaatcgcgggacacgaaacaacaagtggtcttttatcatttgcgctgtatttcttagtgaaaaatccacatgtattacaaaaagtagcagaagaagcagcacgagttctagtagatcctgttccaagctacaaacaagtcaaacagcttaaatatgtcggcatggtcttaaacgaagcgctgcgcttatggccaactggtcctgcgttttccctatatgcaaaagaagatacggtgcttggaggagaatatcctttaaccaaaggcgacgaagtaatggttctgattcctcagcttcaccgtgataaaacaatttggggagacgatgtggagtcgttccgtccagagcgttttgaaaatccaagtgcgattccgcagcatgcgtttaaaccgtttggaaacggtcagcgtgcgtgtatcggtcagcagttcgctcttcatgaagcaacgctggtacttggtatgatgctaaaacactttgactttgaagatcatacaaactacgagctcgttattaaggaacgcttaacgttaaaacctgaaggctttgtggtaaaagcaaaatcgaaaggcattccgcttggcctgattccttcacctagcactgaacagtctgctaaaaaagtacgcaaaaaggcagaaaacgctcataatacgccgctgcttgtgctatacggttcaaatgcgggaacagctgaaggaacggcgcgtgatttagcagatattgcaatgagcaaaggatttgcaccgcaggtcgcaacgcttgattcacacgccggaaatcttccgcgcgaaggagctgtattaattgtaacggcgtcttataacggtcatccgcctgataacgcaaagcaatttgtcgactggttagaccaagcgtctgctgatgaagtaaaaggcgttcgctactccgtatttggatgcggcgataaaaactgggctgcgacgtatcaaaaagtgcctgcttttatcgatgaaacgcttgccgctaaaggggcagaaaacatcgctgaccgcggtttcggtgatgcaagcgacgactttgaaggcacttatgaagaatggagtgatcatatgtggagtgacgtagcagcctactttaacctcgacattgaaaacagtgaagataataaatctactctttcacttcaatttgtcgacagcgccgcggatatgccgcttgcgaaaatgcacggtgcgttttcaacgaacgtcgtagcaagcaaagaacttcaacagccaggcagtgcacgaagcacgcgacatcttgaaattgaacttccaaaagaagcttcttatcaagaaggagatcatttaggtgttattcctcgcaactatgaaggaatagtaaaccgtgtaacagcaaggttcggcctaagcgcatcacagcaaatccgtctggaagcagaagaagaaaaattagctcatttgccactcgctaaaacagtatccgtagaagagcttctgcaatacgtggagcttcaagatcctgttacgcgcacgcagcttcgcgcaatggctgctaaaacggtctgcccgccgcataaagtagagcttgaagccttgcttgaaaagcaagcctacaaagaacaagtgctggcaaaacgtttaacaatgcttgaactgcttgaaaaatacccggcgtgtgaaatgaaattcagcgaatttatcgcccttctgccaagcatacgcccgcgctattactcgatttcttcatcacctcgtgtcgatgaaaaacaagcaagcatcacggtcagcgttgtctcaggaccggcgtggagcggatatggagaatataaaggaattgcgtcgaactatcttgccgagctgcaagaaggagatacgattacgtgctttatttccacagatcagtcagaatttacgctgccaaaagaccctgaagtgccgcttatcatggtcggaccgggaacaggcgtcgcgccgtttagaggctttgtgcaggcgcgcaaacagctaaaagaacaaggacagtcacttggagaagcacatttatacttcggctgccgttcacctcatgaagactatctgtatcaagaagagcttgaaaacgcccaaagcgaaggcatcattacgcttcataccgctttttctcgcatgccaaatcagccgaaaacatacgttcagcacgtaatggaacaagacggcaagaaattgattgaacttcttgatcaaggagcgcacttctatatctgcggagacggaagccaaatggcacctgccgttgaagcaacgcttatgaaaagctatgctgacgttcaccaagtgagtgaagcagacgctcgcttatggctgcagcagctagaagaaaaaggccgatacgcaaaagacgtgtgggctggg

SEQ ID NO: 494 - protein, 1049 aa, synthetic construct
  REGION 1..1049: note = Variant of cytochrome P450
MTIKEMPQPKTFGELKNLPLLNTDKPVQALMRIADELGEIFKFEAPGSVTRFLSSQRLIKEACDERRFDKNLSQSLKFARDFLGDGLFTSWTHEPNWKKAHNILGPSFSQHAMRRYHAMMVDIAVQLVQKWERLNADEHIEVSEDMTRLTLDTIGLCGFNYRFNSFYRDQPHPFIVSVVRLLDEIMNKLQRANPDDPAYDENKRQCQEDIKVMNDYVDKIIADRKARGEQSHDLLTQMLNGKDPETGEPLDDGNIRYQIITFLIAGHETTSGLLSFALYFLVKNPHVLQKVAEEAARVLVDPVPSYKQVKQLKYVGMVLNEALRLWPTGPAFSLYAKEDTVLGGEYPLTKGDEVMVLIPQLHRDKTIWGDDVESFRPERFENPSAIPQHAFKPFGNGQRACIGQQFALHEATLVLGMMLKHFDFEDHTNYELVIKERLTLKPEGFVVKAKSKGIPLGLIPSPSTEQSAKKVRKKAENAHNTPLLVLYGSNAGTAEGTARDLADIAMSKGFAPQVATLDSHAGNLPREGAVLIVTASYNGHPPDNAKQFVDWLDQASADEVKGVRYSVFGCGDKNWAATYQKVPAFIDETLAAKGAENIADRGFGDASDDFEGTYEEWSDHMWSDVAAYFNLDIENSEDNKSTLSLQFVDSAADMPLAKMHGAFSTNVVASKELQQPGSARSTRHLEIELPKEASYQEGDHLGVIPRNYEGIVNRVTARFGLSASQQIRLEAEEEKLAHLPLAKTVSVEELLQYVELQDPVTRTQLRAMAAKTVCPPHKVELEALLEKQAYKEQVLAKRLTMLELLEKYPACEMKFSEFIALLPSIRPRYYSISSSPRVDEKQASITVSVVSGPAWSGYGEYKGIASNYLAELQEGDTITCFISTDQSEFTLPKDPEVPLIMVGPGTGVAPFRGFVQARKQLKEQGQSLGEAHLYFGCRSPHEDYLYQEELENAQSEGIITLHTAFSRMPNQPKTYVQHVMEQDGKKLIELLDQGAHFYICGDGSQMAPAVEATLMKSYADVHQVSEADARLWLQQLEEKGRYAKDVWAG

SEQ ID NO: 495 - DNA, 3147 bp, synthetic construct
  misc_feature 1..3147: note = Variant of cytochrome P450
  source 1..3147: mol_type = other DNA
atgacaattaaggaaatgcctcagcctaagacgtttggagaacttaaaaatttaccgttattaaacacagataaaccggttcaagctttgatgcgtattgcggatgaattaggagaaatctttaaattcgaggcgcctggtagcgtaacgcgctttttatcaagtcagcgtctaattaaagaagcatgcgatgaacgtcgctttgataaaaacttaagtcaatcgctgaaatttgcccgtgattttctgggagacgggttatttacaagctggacgcatgaaccgaattggaaaaaagcgcataatatcttaggcccaagctttagtcagctggcaatgcgccgttatcatgcgatgatggtcgatatcgccgtgcagcttgttcaaaagtgggagcgtctaaatgcagatgagcatattgaagtatcggaagacatgacacgtttaacgctggatacaattggtctttgcggcttcaactatcgctttaacagcttttaccgagatcagcctcatccatttattgtgtcggtagtgcgtgcactggatgaagtaatgaacaagctgcagcgagcaaatccagacgacccagcttatgatgaaaacaagcgccagtgccaagaagatatcaaggtgatgaacgactatgtcgataaaattattgcagatcgcaaagcaaggggtgaacaaagccatgatttattaacgcagatgctaaacggaaaagatccagaaacgggtgagccgcttgatgacgggaacattcgttatcaaattattacattcttaatcgcgggacacgaaacaacaagtggtcttttatcatttgcgctgtatttcttagtgaaaaatccacatgtattacaaaaagtagcagaagaagcagcacgagttctagtagatcctgttccaagctacaaacaagtcaaacagcttaaatatgtcggcatggtcttaaacgaagcgctgcgcttatggccaactggtcctgcgttttccctatatgcaaaagaagatacggtgcttggaggagaatatcctttaaccaaaggcgacgaagtaatggttctgattcctcagcttcaccgtgataaaacaatttggggagacgatgtggagtcgttccgtccagagcgttttgaaaatccaagtgcgattccgcagcatgcgtttaaaccgtttggaaacggtcagcgtgcgtgtatcggtcagcagttcgctcttcatgaagcaacgctggtacttggtatgatgctaaaacactttgactttgaagatcatacaaactacgagctcgttattaaggaacgcttaacgttaaaacctgaaggctttgtggtaaaagcaaaatcgaaaggcattccgcttggcctgattccttcacctagcactgaacagtctgctaaaaaagtacgcaaaaaggcagaaaacgctcataatacgccgctgcttgtgctatacggttcaaatgcgggaacagctgaaggaacggcgcgtgatttagcagatattgcaatgagcaaaggatttgcaccgcaggtcgcaacgcttgattcacacgccggaaatcttccgcgcgaaggagctgtattaattgtaacggcgtcttataacggtcatccgcctgataacgcaaagcaatttgtcgactggttagaccaagcgtctgctgatgaagtaaaaggcgttcgctactccgtatttggatgcggcgataaaaactgggctgcgacgtatcaaaaagtgcctgcttttatcgatgaaacgcttgccgctaaaggggcagaaaacatcgctgaccgcggtgagggtgatgcaagcgacgactttgaaggcgcttatgaagaatggagtgatcatatgtggagtgacgtagcagcctactttaacctcgacattgaaaacagtgaagataataaatctactctttcacttcaatttgtcgacagcgccgcggatatgccgcttgcgaaaatgcacggtgcgttttcaacgaacgtcgtagcaagcaaagaacttcaacagccaggcagtgcacgaagcacgcgacatcttgaaattgaacttccaaaagaagcttcttatcaagaaggagatcatttaggtgttattcctcgcaactatgaaggaatagtaaaccgtgtaacagcaaggttcggcctaagcgcatcacagcagatccgtctggaagcagaagaagaaaaattagctcatttgccactcgctaaaacagtatccgtagaagagcttctgcaatacgtggagcttcaagatcctgttacgcgcacgcagcttcgcgcaatggctgctaaaacggtctgcccgccgcataaagtagagcttgaagccttgcttgaaaagcaagcctacaaagaacaagtgctggcaaaacgtttaacaatgcttgaactgcttgaaaaatacccggcgtgtgaaatgaaattcagcgaatttatcgcccttctgccaagcatacgcccgcgctattactcgatttcttcatcacctcgtgtcgatgaaaaacaagcaagcatcacggtcagcgttgtctcaggaccagcgtggagcggatatggagaatataaaggaattgcgtcgaactatcttgccgagctgcaagaaggagatacgattacgtgctttatttccacagatcagtcagaatttacgctgccaaaagaccctctggtgccgcttatcatggtcggaccgggaacaggcgtcgcgccgtttagaggctttgtgcaggcgcgcaaacagctaaaagaacaaggacagtcacttggagaagcacatttatacttcggctgccgttcacctcatgaagactatctgtatcaagaagagcttgaaaacgcccaaagcgaaggcatcattacgcttcataccgctttttctcgcatgccaaatcagccgaaaacatacgttcagcacgtaatggaacaagacggcaagaaattgattgaacttcttgatcaaggagcgcacttctattgttgcggagacggaagccaaatggcacctgccgttgaagcaacgcttatgaaaagctatgctgacgttcaccaagtgagtgaggcagacgctcgcttatggctgcagcagctagaagaaaaaggccgatacgcaaaagacgtgtgggctggg

SEQ ID NO: 496 - protein, 1049 aa, synthetic construct
  REGION 1..1049: note = Variant of cytochrome P450
MTIKEMPQPKTFGELKNLPLLNTDKPVQALMRIADELGEIFKFEAPGSVTRFLSSQRLIKEACDERRFDKNLSQSLKFARDFLGDGLFTSWTHEPNWKKAHNILGPSFSQLAMRRYHAMMVDIAVQLVQKWERLNADEHIEVSEDMTRLTLDTIGLCGFNYRFNSFYRDQPHPFIVSVVRALDEVMNKLQRANPDDPAYDENKRQCQEDIKVMNDYVDKIIADRKARGEQSHDLLTQMLNGKDPETGEPLDDGNIRYQIITFLIAGHETTSGLLSFALYFLVKNPHVLQKVAEEAARVLVDPVPSYKQVKQLKYVGMVLNEALRLWPTGPAFSLYAKEDTVLGGEYPLTKGDEVMVLIPQLHRDKTIWGDDVESFRPERFENPSAIPQHAFKPFGNGQRACIGQQFALHEATLVLGMMLKHFDFEDHTNYELVIKERLTLKPEGFVVKAKSKGIPLGLIPSPSTEQSAKKVRKKAENAHNTPLLVLYGSNAGTAEGTARDLADIAMSKGFAPQVATLDSHAGNLPREGAVLIVTASYNGHPPDNAKQFVDWLDQASADEVKGVRYSVFGCGDKNWAATYQKVPAFIDETLAAKGAENIADRGEGDASDDFEGAYEEWSDHMWSDVAAYFNLDIENSEDNKSTLSLQFVDSAADMPLAKMHGAFSTNVVASKELQQPGSARSTRHLEIELPKEASYQEGDHLGVIPRNYEGIVNRVTARFGLSASQQIRLEAEEEKLAHLPLAKTVSVEELLQYVELQDPVTRTQLRAMAAKTVCPPHKVELEALLEKQAYKEQVLAKRLTMLELLEKYPACEMKFSEFIALLPSIRPRYYSISSSPRVDEKQASITVSVVSGPAWSGYGEYKGIASNYLAELQEGDTITCFISTDQSEFTLPKDPLVPLIMVGPGTGVAPFRGFVQARKQLKEQGQSLGEAHLYFGCRSPHEDYLYQEELENAQSEGIITLHTAFSRMPNQPKTYVQHVMEQDGKKLIELLDQGAHFYCCGDGSQMAPAVEATLMKSYADVHQVSEADARLWLQQLEEKGRYAKDVWAG

SEQ ID NO: 497 - DNA, 3147 bp, synthetic construct
  misc_feature 1..3147: note = Variant of cytochrome P450
  source 1..3147: mol_type = other DNA
atgacaattaaggaaatgcctcagcctaagacgtttggagaacttaaaaatttaccgttattaaacacagataaaccggttcaagctttgatgcgtattgcggatgaattaggagaaatctttaaattcgaggcgcctggtagcgtaacgcgctttttatcaagtcagcgtctaattaaagaagcatgcgatgaacgtcgctttgataaaaacttaagtcaatcgctgaaatttgcccgtgattttctgggagacgggttatttacaagctggacgcatgaaccgaattggaaaaaagcgcataatatcttaggcccaagctttagtcagcatgcaatgggccgttatcatgcgatgatggtcgatatcgccgtgcagcttgttcaaaagtgggagcgtctaaatgcagatgagcatattgaagtatcggaagacatgacacgtttaacgctggatacaattggtctttgcggcttcaactatcgctttaacagcttttaccgagatcagcctcatccatttattgtggcggtagtgcgtctgctggatgaaatcatgaacaagctgcagcgagcaaatccagacgacccagcttatgatgaaaacaagcgccagtgtcaagaagatatcaaggtgatgaacgactatgtcgataaaattattgcagatcgcaaagcaaggggtgaacaaagccatgatttattaacgcagatgctaaacggaaaagatccagaaacgggtgagccgcttgatgacgggaacattcgttatcaaattattacattcttaatcgcgggacacgaaacaacaagtggtcttttatcatttgcgctgtatttcttagtgaaaaatccacatgtattacaaaaagtagcagaagaagcagcacgagttctagtagatcctgttccaagctacaaacaagtcaaacagcttaaatatgtcggcatggtcttaaacgaagcgctgcgcttatggccaactggtcctgcgttttccctatatgcaaaagaagatacggtgcttggaggagaatatcctttaaccaaaggcgacgaagtaatggttctgattcctcagcttcaccgtgataaaacaatttggggagacgatgtggagtcgttccgtccagagcgttttgaaaatccaagtgcgattccgcagcatgcgtttaaaccgtttggaaacggtcagcgtgcgtgtatcggtcagcagttcgctcttcatgaagcaacgctggtacttggtatgatgctaaaacactttgactttgaagatcatacaaactacgagctcgttattaaggaacgcttaacgttaaaacctgaaggctttgtggtaaaagcaaaatcgaaaggcattccgcttggcctgattccttcacctagcactgaacagtctgctaaaaaagtacgcaaaaaggcagaaaacgctcataatacgccgctgcttgtgctatacggttcaaatgcgggaacagctgaaggaacggcgcgtgatttagcagatattgcaatgagcaaaggatttgcaccgcaggtcgcaacgcttgattcacacgccggaaatcttccgcgcgaaggagctgtattaattgtaacggcgtcttataacggtcatccgcctgataacgcaaagcaatttgtcgactggttagaccaagcgtctgctgatgaagtaaaaggcgttcgctactccgtatttggatgcggcgataaaaactgggctgcgacgtatcaaaaagtgcctgcttttatcgatgaaacgcttgccgctaaaggggcagaaaacatcgctgaccgcggtttcgctgatgcaagcgacgactttgaaggcgcttatgaagaatggagtgatcatatgtggagtgacgtagcagcctactttaacctcgacattgaaaacagtgaagataataaatctactcttagccttcaatttgtcgacagcgccgcggatatgccgcttgcgaaaatgcacggtgcgttttcaacgaacgtcgtagcaagcaaagaacttcaacagccaggcagtgcacgaagcacgcgacatcttgaaattgaacttccaaaagaagcttcttatcaagaaggagatcatttaggtgttattcctcgcaactatgaaggaatagtaaaccgtgtaacagcaaggttcggcctaagcgcatcacagctgatccgtctggaagcagaagaagaaaaattagctcatttgccactcgctaaaacagtatccgtagaagagcttctgcaatacgtggagcttcaagatcctgttacgcgcacgcagcttcgcgcaatggctgctaaaacggtctgcccgccgcataaagtagagcttgaagccttgcttgaaaagcaagcctacaaagaacaagtgctggcaaaacgtttaacaatgcttgaactgcttgaaaaatacccggcgtgtgaaatgaaattcagcgaatttatcgcccttctgccaagcatacgcccgcgctattactcgatttcttcatcacctcgtgtcgatgaaaaacaagcaagcatcacggtcagcgttgtctcaggagacgcgtggagcggatatggagaatataaaggaattgcgtcgaactatcttgccgagctgcaagaaggagatacgattacgtgctttatttccacagatcagtcagaatttacgctgccaaaagaccctctggtgccgcttatcatggtcggaccgggaacaggcgtcgcgccgtttagaggctttgtgcaggcgcgcaaacagctaaaagaacaaggacagtcacttggagaagcacatttatacttcggctgccgttcacctcatgaagactatctgtatcaagaagagcttgaaaacgcccaaagcgaaggcatcattacgcttcataccgctttttctcgcatgccaaatcagccgaaaacatacgttcagcacgtaatggaacaagacggcaagaaattgattgaacttcttgatcaaggagcgcacttctattgttgcggagacggaagccaaatggcacctgccgttgaagcaacgcttatgaaaagctatgctgacgttcaccaagtgagtgaggcagacgctcgcttatggctgcagcagctagaagaaaaaggccgatacgcaaaagacgtgtgggctggg

SEQ ID NO: 498 - protein, 1049 aa, synthetic construct
  REGION 1..1049: note = Variant of cytochrome P450
MTIKEMPQPKTFGELKNLPLLNTDKPVQALMRIADELGEIFKFEAPGSVTRFLSSQRLIKEACDERRFDKNLSQSLKFARDFLGDGLFTSWTHEPNWKKAHNILGPSFSQHAMGRYHAMMVDIAVQLVQKWERLNADEHIEVSEDMTRLTLDTIGLCGFNYRFNSFYRDQPHPFIVAVVRLLDEIMNKLQRANPDDPAYDENKRQCQEDIKVMNDYVDKIIADRKARGEQSHDLLTQMLNGKDPETGEPLDDGNIRYQIITFLIAGHETTSGLLSFALYFLVKNPHVLQKVAEEAARVLVDPVPSYKQVKQLKYVGMVLNEALRLWPTGPAFSLYAKEDTVLGGEYPLTKGDEVMVLIPQLHRDKTIWGDDVESFRPERFENPSAIPQHAFKPFGNGQRACIGQQFALHEATLVLGMMLKHFDFEDHTNYELVIKERLTLKPEGFVVKAKSKGIPLGLIPSPSTEQSAKKVRKKAENAHNTPLLVLYGSNAGTAEGTARDLADIAMSKGFAPQVATLDSHAGNLPREGAVLIVTASYNGHPPDNAKQFVDWLDQASADEVKGVRYSVFGCGDKNWAATYQKVPAFIDETLAAKGAENIADRGFADASDDFEGAYEEWSDHMWSDVAAYFNLDIENSEDNKSTLSLQFVDSAADMPLAKMHGAFSTNVVASKELQQPGSARSTRHLEIELPKEASYQEGDHLGVIPRNYEGIVNRVTARFGLSASQLIRLEAEEEKLAHLPLAKTVSVEELLQYVELQDPVTRTQLRAMAAKTVCPPHKVELEALLEKQAYKEQVLAKRLTMLELLEKYPACEMKFSEFIALLPSIRPRYYSISSSPRVDEKQASITVSVVSGDAWSGYGEYKGIASNYLAELQEGDTITCFISTDQSEFTLPKDPLVPLIMVGPGTGVAPFRGFVQARKQLKEQGQSLGEAHLYFGCRSPHEDYLYQEELENAQSEGIITLHTAFSRMPNQPKTYVQHVMEQDGKKLIELLDQGAHFYCCGDGSQMAPAVEATLMKSYADVHQVSEADARLWLQQLEEKGRYAKDVWAG

SEQ ID NO: 499 - DNA, 3147 bp, synthetic construct
  misc_feature 1..3147: note = Variant of cytochrome P450
  source 1..3147: mol_type = other DNA
atgacaattaaggaaatgcctcagcctaagacgtttggagaacttaaaaatttaccgttattaaacacagataaaccggttcaagctttgatgcgtattgcggatgaattaggagaaatctttaaattcgaggcgcctggtagcgtaacgcgctttttatcaagtcagcgtctaattaaagaagcatgcgatgaacgtcgctttgataaaaacttaagtcaatcgctgaaatttgcccgtgattttctgggagacgggttatttacaagctggacgcatgaaccgaattggaaaaaagcgcataatatcttaggcccaagctttagtcagctggcaatgcgccgttatcatgcgatgatggtcgatatcgccgtgcagcttgttcaaaagtgggagcgtctaaatgcagatgagcatattgaagtatcggaagacatgacacgtttaacgctggatacaattggtctttgcggcttcaactatcgctttaacagcttttaccgagatcagcctcatccatttattgtggcggtagtgcgtctgctggatgaagtcatgaacaagctgcagcgagcaaatccagacgacccagcttatgatgaaaacaagcgccagtgccaagaagatatcaaggtgatgaacgactatgtcgataaaattattgcagatcgcaaagcaaggggtgaacaaagccatgatttattaacgcagatgctaaacggaaaagatccagaaacgggtgagccgcttgatgacgggaacattcgttatcaaattattacattcttaatcgcgggacacgaaacaacaagtggtcttttatcatttgcgctgtatttcttagtgaaaaatccacatgtattacaaaaagtagcagaagaagcagcacgagttctagtagatcctgttccaagctacaaacaagtcaaacagcttaaatatgtcggcatggtcttaaacgaagcgctgcgcttatggccaactggtcctgcgttttccctatatgcaaaagaagatacggtgcttggaggagaatatcctttaaccaaaggcgacgaagtaatggttctgattcctcagcttcaccgtgataaaacaatttggggagacgatgtggagtcgttccgtccagagcgttttgaaaatccaagtgcgattccgcagcatgcgtttaaaccgtttggaaacggtcagcgtgcgtgtatcggtcagcagttcgctcttcatgaagcaacgctggtacttggtatgatgctaaaacactttgactttgaagatcatacaaactacgagctcgttattaaggaacgcttaacgttaaaacctgaaggctttgtggtaaaagcaaaatcgaaaggcattccgcttggcctgattccttcacctagcactgaacagtctgctaaaaaagtacgcaaaaaggcagaaaacgctcataatacgccgctgcttgtgctatacggttcaaatgcgggaacagctgaaggaacggcgcgtgatttagcagatattgcaatgagcaaaggatttgcaccgcaggtcgcaacgcttgattcacacgccggaaatcttccgcgcgaaggagctgtattaattgtaacggcgtcttataacggtcatccgcctgataacgcaaagcaatttgtcgactggttagaccaagcgtctgctgatgaagtaaaaggcgttcgctactccgtatttggatgcggcgataaaaactgggctgcgacgtatcaaaaagtgcctgcttttatcgatgaaacgcttgccgctaaaggggcagaaaacatcgctgaccgcggtttcgctgatgcaagcgacgactttgaaggcacttatgaagaatggagtgatcatatgtggagtgacgtagcagcctactttaacctcgacattgaaaacagtgaagataataaatctactcttacccttcaatttgtcgacagcgccgcggatatgccgcttgcgaaaatgcacggtgcgttttcaacgaacgtcgtagcaagcaaagaacttcaacagccaggcagtgcacgaagcacgcgacatcttgaaattgaacttccaaaagaagcttcttatcaagaaggagatcatttaggtgttattcctcgcaactatgaaggaatagtaaaccgtgtaacagcaaggttcggcctaagcgcatcacagcagatccgtctggaagcagaagaagaaaaattagctcatttgccactcgctaaaacagtatccgtagaagagcttctgcaatacgtggagcttcaagatcctgttacgcgcacgcagcttcgcgcaatggctgctaaaacggtctgcccgccgcataaagtagagcttgaagccttgcttgaaaagcaagcctacaaagaacaagtgctggcaaaacgtttaacaatgcttgaactgcttgaaaaatacccggcgtgtgaaatgaaattcagcgaatttatcgcccttctgccaagcatacgcccgcgctattactcgatttcttcatcacctcgtgtcgatgaaaaacaagcaagcatcacggtcagcgttgtctcaggagacgcgtggagcggatatggagaatataaaggaattgcgtcgaactatcttgccgagctgcaagaaggagatacgattacgtgctttatttccacagatcagtcagaatttacgctgccaaaagaccctctgactccgcttatcatggtcggaccgggaacaggcgtcgcgccgtttagaggctttgtgcaggcgcgcaaacagctaaaagaacaaggacagtcacttggagaagcacatttatacttcggctgccgttcacctcatgaagactatctgtatcaagaagagcttgaaaacgcccaaagcgaaggcatcattacgcttcataccgctttttctcgcatgccaaatcagccgaaaacatacgttcagcacgtaatggaacaagacggcaagaaattgattgaacttcttgatcaaggagcgcacttctattgttgcggagacggaagccaaatggcacctgccgttgaagcaacgcttatgaaaagctatgctgacgttcaccaagtgagtgaagcagacgctcgcttatggctgcagcagctagaagaaaaaggccgatacgcaaaagacgtgtgggctggg

SEQ ID NO: 500 - protein, 1049 aa, synthetic construct
  REGION 1..1049: note = Variant of cytochrome P450
MTIKEMPQPKTFGELKNLPLLNTDKPVQALMRIADELGEIFKFEAPGSVTRFLSSQRLIKEACDERRFDKNLSQSLKFARDFLGDGLFTSWTHEPNWKKAHNILGPSFSQLAMRRYHAMMVDIAVQLVQKWERLNADEHIEVSEDMTRLTLDTIGLCGFNYRFNSFYRDQPHPFIVAVVRLLDEVMNKLQRANPDDPAYDENKRQCQEDIKVMNDYVDKIIADRKARGEQSHDLLTQMLNGKDPETGEPLDDGNIRYQIITFLIAGHETTSGLLSFALYFLVKNPHVLQKVAEEAARVLVDPVPSYKQVKQLKYVGMVLNEALRLWPTGPAFSLYAKEDTVLGGEYPLTKGDEVMVLIPQLHRDKTIWGDDVESFRPERFENPSAIPQHAFKPFGNGQRACIGQQFALHEATLVLGMMLKHFDFEDHTNYELVIKERLTLKPEGFVVKAKSKGIPLGLIPSPSTEQSAKKVRKKAENAHNTPLLVLYGSNAGTAEGTARDLADIAMSKGFAPQVATLDSHAGNLPREGAVLIVTASYNGHPPDNAKQFVDWLDQASADEVKGVRYSVFGCGDKNWAATYQKVPAFIDETLAAKGAENIADRGFADASDDFEGTYEEWSDHMWSDVAAYFNLDIENSEDNKSTLTLQFVDSAADMPLAKMHGAFSTNVVASKELQQPGSARSTRHLEIELPKEASYQEGDHLGVIPRNYEGIVNRVTARFGLSASQQIRLEAEEEKLAHLPLAKTVSVEELLQYVELQDPVTRTQLRAMAAKTVCPPHKVELEALLEKQAYKEQVLAKRLTMLELLEKYPACEMKFSEFIALLPSIRPRYYSISSSPRVDEKQASITVSVVSGDAWSGYGEYKGIASNYLAELQEGDTITCFISTDQSEFTLPKDPLTPLIMVGPGTGVAPFRGFVQARKQLKEQGQSLGEAHLYFGCRSPHEDYLYQEELENAQSEGIITLHTAFSRMPNQPKTYVQHVMEQDGKKLIELLDQGAHFYCCGDGSQMAPAVEATLMKSYADVHQVSEADARLWLQQLEEKGRYAKDVWAG

SEQ ID NO: 501 - DNA, 3147 bp, synthetic construct
  misc_feature 1..3147: note = Variant of cytochrome P450
  source 1..3147: mol_type = other DNA
atgacaattaaggaaatgcctcagcctaagacgtttggagaacttaaaaatttaccgttattaaacacagataaaccggttcaagctttgatgcgtattgcggatgaattaggagaaatctttaaattcgaggcgcctggtagcgtaacgcgctttttatcaagtcagcgtctaattaaagaagcatgcgatgaacgtcgctttgataaaaacttaagtcaatcgctgaaatttgcccgtgattttctgggagacgggttatttacaagctggacgcatgaaccgaattggaaaaaagcgcataatatcttaggcccaagctttagtcagcatgcaatgggccgttatcatgcgatgatggtcgatatcgccgtgcagcttgttcaaaagtgggagcgtctaaatgcagatgagcatattgaagtatcggaagacatgacacgtttaacgctggatacaattggtctttgcggcttcaactatcgctttaacagcttttaccgagatcagcctcatccatttattgtgtcggtagtgcgtctgctggatgaagtcatgaacaagctgcagcgagcaaatccagacgacccagcttatgatgaaaacaagcgccagtgccaagaagatatcaaggtgatgaacgactatgtcgataaaattattgcagatcgcaaagcaaggggtgaacaaagccatgatttattaacgcagatgctaaacggaaaagatccagaaacgggtgagccgcttgatgacgggaacattcgttatcaaattattacattcttaatcgcgggacacgaaacaacaagtggtcttttatcatttgcgctgtatttcttagtgaaaaatccacatgtattacaaaaagtagcagaagaagcagcacgagttctagtagatcctgttccaagctacaaacaagtcaaacagcttaaatatgtcggcatggtcttaaacgaagcgctgcgcttatggccaactggtcctgcgttttccctatatgcaaaagaagatacggtgcttggaggagaatatcctttaaccaaaggcgacgaagtaatggttctgattcctcagcttcaccgtgataaaacaatttggggagacgatgtggaggaattccgtccagagcgttttgaaaatccaagtgcgattccgcagcatgcgtttaaaccgtttggaaacggtcagcgtgcgtgtatcggtcagcagttcgctcttcatgaagcaacgctggtacttggtatgatgctaaaacactttgactttgaagatcatacaaactacgagctcgttattaaggaacgcttaacgttaaaacctgaaggctttgtggtaaaagcaaaatcgaaaggcattccgcttggcctgattccttcacctagcactgaacagtctgctaaaaaagtacgcaaaaaggcagaaaacgctcataatacgccgctgcttgtgctatacggttcaaatgcgggaacagctgaaggaacggcgcgtgatttagcagatattgcaatgagcaaaggatttgcaccgcaggtcgcaacgcttgattcacacgccggaaatcttccgcgcgaaggagctgtattaattgtaacggcgtcttataacggtcatccgcctgataacgcaaagcaatttgtcgactggttagaccaagcgtctgctgatgaagtaaaaggcgttcgctactccgtatttggatgcggcgataaaaactgggctgcgacgtatcaaaaagtgcctgcttttatcgatgaaacgcttgccgctaaaggggcagaaaacatcgctgaccgcggtttcgctgatgcaagcgacgactttgaaggcgcttatgaagaatggagtgatcatatgtggagtgacgtagcagcctactttaacctcgacattgaaaacagtgaagataataaatctactctttcacttcaatttgtcgacagcgccgcggatatgccgcttgcgaaaatgcacggtgcgttttcaacgaacgtcgtagcaagcaaagaacttcaacagccaggcagtgcacgaagcacgcgacatcttgaaattgaacttccaaaagaagcttcttatcaagaaggagatcatttaggtgttattcctcgcaactatgaaggaatagtaaaccgtgtaacagcaaggttcggcctaagcgcatcacagctgatccgtctggaagcagaagaagaaaaattagctcatttgccactcgctaaaacagtatccgtagaagagcttctgcaatacgtggagcttcaagatcctgttacgcgcacgcagcttcgcgcaatggctgctaaaacggtctgcccgccgcataaagtagagcttgaagccttgcttgaaaagcaagcctacaaagaacaagtgctggcaaaacgtttaacaatgcttgaactgcttgaaaaatacccggcgtgtgaaatgaaattcagcgaatttatcgcccttctgccaagcatacgcccgcgctattactcgatttcttcatcacctcgtgtcgatgaaaaacaagcaagcatcacggtcagcgttgtctcaggagacgcgtggagcggatatggagaatataaaggaattgcgtcgaactatcttgccgagctgcaagaaggagatacgattacgtgctttatttccacagatcagtcagaatttacgctgccaaaagaccctgaagtgccgcttatcatggtcggaccgggaacaggcgtcgcgccgtttagaggctttgtgcaggcgcgcaaacagctaaaagaacaaggacagtcacttggagaagcacatttatacttcggctgccgttcacctcatgaagactatctgtatcaagaagagcttgaaaacgcccaaagcgaaggcatcattacgcttcataccgctttttctcgcatgccaaatcagccgaaaacatacgttcagcacgtaatggaacaagacggcaagaaattgattgaacttcttgatcaaggagcgcacttctattgttgcggagacggaagccaaatggcacctgccgttgaagcaacgcttatgaaaagctatgctgacgttcaccaagtgagtgaggcagacgctcgcttatggctgcagcagctagaagaaaaaggccgatacgcaaaagacgtgtgggctggg

SEQ ID NO: 502 - protein, 1049 aa, synthetic construct
  REGION 1..1049: note = Variant of cytochrome P450
MTIKEMPQPKTFGELKNLPLLNTDKPVQALMRIADELGEIFKFEAPGSVTRFLSSQRLIKEACDERRFDKNLSQSLKFARDFLGDGLFTSWTHEPNWKKAHNILGPSFSQHAMGRYHAMMVDIAVQLVQKWERLNADEHIEVSEDMTRLTLDTIGLCGFNYRFNSFYRDQPHPFIVSVVRLLDEVMNKLQRANPDDPAYDENKRQCQEDIKVMNDYVDKIIADRKARGEQSHDLLTQMLNGKDPETGEPLDDGNIRYQIITFLIAGHETTSGLLSFALYFLVKNPHVLQKVAEEAARVLVDPVPSYKQVKQLKYVGMVLNEALRLWPTGPAFSLYAKEDTVLGGEYPLTKGDEVMVLIPQLHRDKTIWGDDVEEFRPERFENPSAIPQHAFKPFGNGQRACIGQQFALHEATLVLGMMLKHFDFEDHTNYELVIKERLTLKPEGFVVKAKSKGIPLGLIPSPSTEQSAKKVRKKAENAHNTPLLVLYGSNAGTAEGTARDLADIAMSKGFAPQVATLDSHAGNLPREGAVLIVTASYNGHPPDNAKQFVDWLDQASADEVKGVRYSVFGCGDKNWAATYQKVPAFIDETLAAKGAENIADRGFADASDDFEGAYEEWSDHMWSDVAAYFNLDIENSEDNKSTLSLQFVDSAADMPLAKMHGAFSTNVVASKELQQPGSARSTRHLEIELPKEASYQEGDHLGVIPRNYEGIVNRVTARFGLSASQLIRLEAEEEKLAHLPLAKTVSVEELLQYVELQDPVTRTQLRAMAAKTVCPPHKVELEALLEKQAYKEQVLAKRLTMLELLEKYPACEMKFSEFIALLPSIRPRYYSISSSPRVDEKQASITVSVVSGDAWSGYGEYKGIASNYLAELQEGDTITCFISTDQSEFTLPKDPEVPLIMVGPGTGVAPFRGFVQARKQLKEQGQSLGEAHLYFGCRSPHEDYLYQEELENAQSEGIITLHTAFSRMPNQPKTYVQHVMEQDGKKLIELLDQGAHFYCCGDGSQMAPAVEATLMKSYADVHQVSEADARLWLQQLEEKGRYAKDVWAG

SEQ ID NO: 503 - DNA, 3147 bp, synthetic construct
  misc_feature 1..3147: note = Variant of cytochrome P450
  source 1..3147: mol_type = other DNA
atgacaattaaggaaatgcctcagcctaagacgtttggagaacttaaaaatttaccgttattaaacacagataaaccggttcaagctttgatgcgtattgcggatgaattaggagaaatctttaaattcgaggcgcctggtagcgtaacgcgctttttatcaagtcagcgtctaattaaagaagcatgcgatgaacgtcgctttgataaaaacttaagtcaatcgctgaaatttgcccgtgattttctgggagacgggttatttacaagctggacgcatgaaccgaattggaaaaaagcgcataatatcttaggcccaagctttagtcagctggcaatgcgccgttatcatgcgatgatggtcgatatcgccgtgcagcttgttcaaaagtgggagcgtctaaatgcagatgagcatattgaagtatcggaagacatgacacgtttaacgctggatacaattggtctttgcggcttcaactatcgctttaacagcttttaccgagatcagcctcatccatttattgtgtcggtagtgcgtctgctggatgaaatcatgaacaagctgcagcgagcaaatccagacgacccagcttatgatgaaaacaagcgccagtgccaagaagatatcaaggtgatgaacgactatgtcgataaaattattgcagatcgcaaagcaaggggtgaacaaagccatgatttattaacgcagatgctaaacggaaaagatccagaaacgggtgagccgcttgatgacgggaacattcgttatcaaattattacattcttaatcgcgggacacgaaacaacaagtggtcttttatcatttgcgctgtatttcttagtgaaaaatccacatgtattacaaaaagtagcagaagaagcagcacgagttctagtagatcctgttccaagctacaaacaagtcaaacagcttaaatatgtcggcatggtcttaaacgaagcgctgcgcttatggccaactggtcctgcgttttccctatatgcaaaagaagatacggtgcttggaggagaatatcctttaaccaaaggcgacgaagtaatggttctgattcctcagcttcaccgtgataaaacaatttggggagacgatgtggagtcgttccgtccagagcgttttgaaaatccaagtgcgattccgcagcatgcgtttaaaccgtttggaaacggtcagcgtgcgtgtatcggtcagcagttcgctcttcatgaagcaacgctggtacttggtatgatgctaaaacactttgactttgaagatcatacaaactacgagctcgttattaaggaacgcttaacgttaaaacctgaaggctttgtggtaaaagcaaaatcgaaaggcattccgcttggcctgattccttcacctagcactgaacagtctgctaaaaaagtacgcaaaaaggcagaaaacgctcataatacgccgctgcttgtgctatacggttcaaatgcgggaacagctgaaggaacggcgcgtgatttagcagatattgcaatgagcaaaggatttgcaccgcaggtcgcaacgcttgattcacacgccggaaatcttccgcgcgaaggagctgtattaattgtaacggcgtcttataacggtcatccgcctgataacgcaaagcaatttgtcgactggttagaccaagcgtctgctgatgaagtaaaaggcgttcgctactccgtatttggatgcggcgataaaaactgggctgcgacgtatcaaaaagtgcctgcttttatcgatgaaacgcttgccgctaaaggggcagaaaacatcgctgaccgcggtgaggctgatgcaagcgacgactttgaaggcacttatgaagaatggagtgatcatatgtggagtgacgtagcagcctactttaacctcgacattgaaaacagtgaagataataaatctactctttcacttcaatttgtcgacagcgccgcggatatgccgcttgcgaaaatgcacggtgcgttttcaacgaacgtcgtagcaagcaaagaacttcaacagccaggcagtgcacgaagcacgcgacatcttgaaattgaacttccaaaagaagcttcttatcaagaaggagatcatttaggtgttattcctcgcaactatgaaggaatagtaaaccgtgtaacagcaaggttcggcctaagcgcatcacagcagatccgtctggaagcagaagaagaaaaattagctcatttgccactcgctaaaacagtatccgtagaagagcttctgcaatacgtggagcttcaagatcctgttacgcgcacgcagcttcgcgcaatggctgctaaaacggtctgcccgccgcataaagtagagcttgaagccttgcttgaaaagcaagcctacaaagaacaagtgctggcaaaacgtttaacaatgcttgaactgcttgaaaaatacccggcgtgtgaaatgaaattcagcgaatttatcgcccttctgccaagcatacgcccgcgctattactcgatttcttcatcacctcgtgtcgatgaaaaacaagcaagcatcacggtcagcgttgtctcaggaccagcgtggagcggatatggagaatataaaggaattgcgtcgaactatcttgccgagctgcaagaaggagatacgattacgtgctttatttccacagatcagtcagaatttacgctgccaaaagaccctgaaacgccgcttatcatggtcggaccgggaacaggcgtcgcgccgtttagaggctttgtgcaggcgcgcaaacagctaaaagaacaaggacagtcacttggagaagcacatttatacttcggctgccgttcacctcatgaagactatctgtatcaagaagagcttgaaaacgcccaaagcgaaggcatcattacgcttcataccgctttttctcgcatgccaaatcagccgaaaacatacgttcagcacgtaatggaacaagacggcaagaaattgattgaacttcttgatcaaggagcgcacttctatatctgcggagacggaagccaaatggcacctgccgttgaagcaacgcttatgaaaagctatgctgacgttcaccaagtgagtgaggcagacgctcgcttatggctgcagcagctagaagaaaaaggccgatacgcaaaagacgtgtgggctggg

SEQ ID NO: 504 - protein, 1049 aa, synthetic construct
  REGION 1..1049: note = Variant of cytochrome P450
MTIKEMPQPKTFGELKNLPLLNTDKPVQALMRIADELGEIFKFEAPGSVTRFLSSQRLIKEACDERRFDKNLSQSLKFARDFLGDGLFTSWTHEPNWKKAHNILGPSFSQLAMRRYHAMMVDIAVQLVQKWERLNADEHIEVSEDMTRLTLDTIGLCGFNYRFNSFYRDQPHPFIVSVVRLLDEIMNKLQRANPDDPAYDENKRQCQEDIKVMNDYVDKIIADRKARGEQSHDLLTQMLNGKDPETGEPLDDGNIRYQIITFLIAGHETTSGLLSFALYFLVKNPHVLQKVAEEAARVLVDPVPSYKQVKQLKYVGMVLNEALRLWPTGPAFSLYAKEDTVLGGEYPLTKGDEVMVLIPQLHRDKTIWGDDVESFRPERFENPSAIPQHAFKPFGNGQRACIGQQFALHEATLVLGMMLKHFDFEDHTNYELVIKERLTLKPEGFVVKAKSKGIPLGLIPSPSTEQSAKKVRKKAENAHNTPLLVLYGSNAGTAEGTARDLADIAMSKGFAPQVATLDSHAGNLPREGAVLIVTASYNGHPPDNAKQFVDWLDQASADEVKGVRYSVFGCGDKNWAATYQKVPAFIDETLAAKGAENIADRGEADASDDFEGTYEEWSDHMWSDVAAYFNLDIENSEDNKSTLSLQFVDSAADMPLAKMHGAFSTNVVASKELQQPGSARSTRHLEIELPKEASYQEGDHLGVIPRNYEGIVNRVTARFGLSASQQIRLEAEEEKLAHLPLAKTVSVEELLQYVELQDPVTRTQLRAMAAKTVCPPHKVELEALLEKQAYKEQVLAKRLTMLELLEKYPACEMKFSEFIALLPSIRPRYYSISSSPRVDEKQASITVSVVSGPAWSGYGEYKGIASNYLAELQEGDTITCFISTDQSEFTLPKDPETPLIMVGPGTGVAPFRGFVQARKQLKEQGQSLGEAHLYFGCRSPHEDYLYQEELENAQSEGIITLHTAFSRMPNQPKTYVQHVMEQDGKKLIELLDQGAHFYICGDGSQMAPAVEATLMKSYADVHQVSEADARLWLQQLEEKGRYAKDVWAG

SEQ ID NO: 505 - DNA, 3147 bp, synthetic construct
  misc_feature 1..3147: note = Variant of cytochrome P450
  source 1..3147: mol_type = other DNA
atgacaattaaggaaatgcctcagcctaagacgtttggagaacttaaaaatttaccgttattaaacacagataaaccggttcaagctttgatgcgtattgcggatgaattaggagaaatctttaaattcgaggcgcctggtagcgtaacgcgctttttatcaagtcagcgtctaattaaagaagcatgcgatgaacgtcgctttgataaaaacttaagtcaatcgctgaaatttgcccgtgattttctgggagacgggttatttacaagctggacgcatgaaccgaattggaaaaaagcgcataatatcttaggcccaagctttagtcagctggcaatgcgccgttatcatgcgatgatggtcgatatcgccgtgcagcttgttcaaaagtgggagcgtctaaatgcagatgagcatattgaagtatcggaagacatgacacgtttaacgctggatacaattggtctttgcggcttcaactatcgctttaacagcttttaccgagatcagcctcatccatttattgtggcggtagtgcgtctgctggatgaagtcatgaacaagctgcagcgagcaaatccagacgacccagcttatgatgaaaacaagcgccagtgccaagaagatatcaaggtgatgaacgactatgtcgataaaattattgcagatcgcaaagcaaggggtgaacaaagccatgatttattaacgcagatgctaaacggaaaagatccagaaacgggtgagccgcttgatgacgggaacattcgttatcaaattattacattcttaatcgcgggacacgaaacaacaagtggtcttttatcatttgcgctgtatttcttagtgaaaaatccacatgtattacaaaaagtagcagaagaagcagcacgagttctagtagatcctgttccaagctacaaacaagtcaaacagcttaaatatgtcggcatggtcttaaacgaagcgctgcgcttatggccaactggtcctgcgttttccctatatgcaaaagaagatacggtgcttggaggagaatatcctttaaccaaaggcgacgaagtaatggttctgattcctcagcttcaccgtgataaaacaatttggggagacgatgtggaggaattccgtccagagcgttttgaaaatccaagtgcgattccgcagcatgcgtttaaaccgtttggaaacggtcagcgtgcgtgtatcggtcagcagttcgctcttcatgaagcaacgctggtacttggtatgatgctaaaacactttgactttgaagatcatacaaactacgagctcgttattaaggaacgcttaacgttaaaacctgaaggctttgtggtaaaagcaaaatcgaaaggcattccgcttggcctgattccttcacctagcactgaacagtctgctaaaaaagtacgcaaaaaggcagaaaacgctcataatacgccgctgcttgtgctatacggttcaaatgcgggaacagctgaaggaacggcgcgtgatttagcagatattgcaatgagcaaaggatttgcaccgcaggtcgcaacgcttgattcacacgccggaaatcttccgcgcgaaggagctgtattaattgtaacggcgtcttataacggtcatccgcctgataacgcaaagcaatttgtcgactggttagaccaagcgtctgctgatgaagtaaaaggcgttcgctactccgtatttggatgcggcgataaaaactgggctgcgacgtatcaaaaagtgcctgcttttatcgatgaaacgcttgccgctaaaggggcagaaaacatcgctgacatgggtttcggtgatgcaagcgacgactttgaaggcgcttatgaagaatggagtgatcatatgtggagtgacgtagcagcctactttaacctcgacattgaaaacagtgaagataataaatctactctttcacttcaatttgtcgacagcgccgcggatatgccgcttgcgaaaatgcacggtgcgttttcaacgaacgtcgtagcaagcaaagaacttcaacagccaggcagtgcacgaagcacgcgacatcttgaaattgaacttccaaaagaagcttcttatcaagaaggagatcatttaggtgttattcctcgcaactatgaaggaatagtaaaccgtgtaacagcaaggttcggcctaagcgcatcacagctgatccgtctggaagcagaagaagaaaaattagctcatttgccactcgctaaaacagtatccgtagaagagcttctgcaatacgtggagcttcaagatcctgttacgcgcacgcagcttcgcgcaatggctgctaaaacggtctgcccgccgcataaagtagagcttgaagccttgcttgaaaagcaagcctacaaagaacaagtgctggcaaaacgtttaacaatgcttgaactgcttgaaaaatacccggcgtgtgaaatgaaattcagcgaatttatcgcccttctgccaagcatacgcccgcgctattactcgatttcttcatcacctcgtgtcgatgaaaaacaagcaagcatcacggtcagcgttgtctcaggaccagcgtggagcggatatggagaatataaaggaattgcgtcgaactatcttgccgagctgcaagaaggagatacgattacgtgctttatttccacagatcagtcagaatttacgctgccaaaagaccctgaaactccgcttatcatggtcggaccgggaacaggcgtcgcgccgtttagaggctttgtgcaggcgcgcaaacagctaaaagaacaaggacagtcacttggagaagcacatttatacttcggctgccgttcacctcatgaagactatctgtatcaagaagagcttgaaaacgcccaaagcgaaggcatcattacgcttcataccgctttttctcgcatgccaaatcagccgaaaacatacgttcagcacgtaatggaacaagacggcaagaaattgattgaacttcttgatcaaggagcgcacttctatatctgcggagacggaagccaaatggcacctgccgttgaagcaacgcttatgaaaagctatgctgacgttcaccaagtgagttatgcagacgctcgcttatggctgcagcagctagaagaaaaaggccgatacgcaaaagacgtgtgggctggg

SEQ ID NO: 506 - protein, 1049 aa, synthetic construct
  REGION 1..1049: note = Variant of cytochrome P450
MTIKEMPQPKTFGELKNLPLLNTDKPVQALMRIADELGEIFKFEAPGSVTRFLSSQRLIKEACDERRFDKNLSQSLKFARDFLGDGLFTSWTHEPNWKKAHNILGPSFSQLAMRRYHAMMVDIAVQLVQKWERLNADEHIEVSEDMTRLTLDTIGLCGFNYRFNSFYRDQPHPFIVAVVRLLDEVMNKLQRANPDDPAYDENKRQCQEDIKVMNDYVDKIIADRKARGEQSHDLLTQMLNGKDPETGEPLDDGNIRYQIITFLIAGHETTSGLLSFALYFLVKNPHVLQKVAEEAARVLVDPVPSYKQVKQLKYVGMVLNEALRLWPTGPAFSLYAKEDTVLGGEYPLTKGDEVMVLIPQLHRDKTIWGDDVEEFRPERFENPSAIPQHAFKPFGNGQRACIGQQFALHEATLVLGMMLKHFDFEDHTNYELVIKERLTLKPEGFVVKAKSKGIPLGLIPSPSTEQSAKKVRKKAENAHNTPLLVLYGSNAGTAEGTARDLADIAMSKGFAPQVATLDSHAGNLPREGAVLIVTASYNGHPPDNAKQFVDWLDQASADEVKGVRYSVFGCGDKNWAATYQKVPAFIDETLAAKGAENIADMGFGDASDDFEGAYEEWSDHMWSDVAAYFNLDIENSEDNKSTLSLQFVDSAADMPLAKMHGAFSTNVVASKELQQPGSARSTRHLEIELPKEASYQEGDHLGVIPRNYEGIVNRVTARFGLSASQLIRLEAEEEKLAHLPLAKTVSVEELLQYVELQDPVTRTQLRAMAAKTVCPPHKVELEALLEKQAYKEQVLAKRLTMLELLEKYPACEMKFSEFIALLPSIRPRYYSISSSPRVDEKQASITVSVVSGPAWSGYGEYKGIASNYLAELQEGDTITCFISTDQSEFTLPKDPETPLIMVGPGTGVAPFRGFVQARKQLKEQGQSLGEAHLYFGCRSPHEDYLYQEELENAQSEGIITLHTAFSRMPNQPKTYVQHVMEQDGKKLIELLDQGAHFYICGDGSQMAPAVEATLMKSYADVHQVSYADARLWLQQLEEKGRYAKDVWAG

SEQ ID NO: 507 - DNA, 3147 bp, synthetic construct
  misc_feature 1..3147: note = Variant of cytochrome P450
  source 1..3147: mol_type = other DNA
atgacaattaaggaaatgcctcagcctaagacgtttggagaacttaaaaatttaccgttattaaacacagataaaccggttcaagctttgatgcgtattgcggatgaattaggagaaatctttaaattcgaggcgcctggtagcgtaacgcgctttttatcaagtcagcgtctaattaaagaagcatgcgatgaacgtcgctttgataaaaacttaagtcaatcgctgaaatttgcccgtgattttctgggagacgggttatttacaagctggacgcatgaaccgaattggaaaaaagcgcataatatcttaggcccaagctttagtcagcgtgcaatgaaacgttatcatgcgatgatggtcgatatcgccgtgcagcttgttcaaaagtgggagcgtctaaatgcagatgagcatattgaagtatcggaagacatgacacgtttaacgctggatacaattggtctttgcggcttcaactatcgctttaacagcttttaccgagatcagcctcatccatttattgtgtcggtagtgcgtgcgctggatgaaatcatgaacaagctgcagcgagcaaatccagacgacccagcttatgatgaaaacaagcgccagtgtcaagaagatatcaaggtgatgaacgactatgtcgataaaattattgcagatcgcaaagcaaggggtgaacaaagccatgatttattaacgcagatgctaaacggaaaagatccagaaacgggtgagccgcttgatgacgggaacattcgttatcaaattattacattcttaatcgcgggacacgaaacaacaagtggtcttttatcatttgcgctgtatttcttagtgaaaaatccacatgtattacaaaaagtagcagaagaagcagcacgagttctagtagatcctgttccaagctacaaacaagtcaaacagcttaaatatgtcggcatggtcttaaacgaagcgctgcgcttatggccaactggtcctgcgttttccctatatgcaaaagaagatacggtgcttggaggagaatatcctttaaccaaaggcgacgaagtaatggttctgattcctcagcttcaccgtgataaaacaatttggggagacgatgtggaggagttccgtccagagcgttttgaaaatccaagtgcgattccgcagcatgcgtttaaaccgtttggaaacggtcagcgtgcgtgtatcggtcagcagttcgctcttcatgaagcaacgctggtacttggtatgatgctaaaacactttgactttgaagatcatacaaactacgagctcgttattaaggaacgcttaacgttaaaacctgaaggctttgtggtaaaagcaaaatcgaaaggcattccgcttggcctgattccttcacctagcactgaacagtctgctaaaaaagtacgcaaaaaggcagaaaacgctcataatacgccgctgcttgtgctatacggttcaaatgcgggaacagctgaaggaacggcgcgtgatttagcagatattgcaatgagcaaaggatttgcaccgcaggtcgcaacgcttgattcacacgccggaaatcttccgcgcgaaggagctgtattaattgtaacggcgtcttataacggtcatccgcctgataacgcaaagcaatttgtcgactggttagaccaagcgtctgctgatgaagtaaaaggcgttcgctactccgtatttggatgcggcgataaaaactgggctgcgacgtatcaaaaagtgcctgcttttatcgatgaaacgcttgccgctaaaggggcagaaaacatcgctgacatgggtgagggtgatgcaagcgacgactttgaaggcgcttatgaagaatggagtgatcatatgtggagtgacgtagcagcctactttaacctcgacattgaaaacagtgaagataataaatctactctttcacttcaatttgtcgacagcgccgcggatatgccgcttgcgaaaatgcacggtgcgttttcaacgaacgtcgtagcaagcaaagaacttcaacagccaggcagtgcacgaagcacgcgacatcttgaaattgaacttccaaaagaagcttcttatcaagaaggagatcatttaggtgttattcctcgcaactatgaaggaatagtaaaccgtgtaacagcaaggttcggcctaagcgcatcacagctgatccgtctggaagcagaagaagaaaaattagctcatttgccactcgctaaaacagtatccgtagaagagcttctgcaatacgtggagcttcaagatcctgttacgcgcacgcagcttcgcgcaatggctgctaaaacggtctgcccgccgcataaagtagagcttgaagccttgcttgaaaagcaagcctacaaagaacaagtgctggcaaaacgtttaacaatgcttgaactgcttgaaaaatacccggcgtgtgaaatgaaattcagcgaatttatcgcccttctgccaagcatacgcccgcgctattactcgatttcttcatcacctcgtgtcgatgaaaaacaagcaagcatcacggtcagcgttgtctcaggagacgcgtggagcggatatggagaatataaaggaattgcgtcgaactatcttgccgagctgcaagaaggagatacgattacgtgctttatttccacagatcagtcagaatttacgctgccaaaagaccctgaaacgccgcttatcatggtcggaccgggaacaggcgtcgcgccgtttagaggctttgtgcaggcgcgcaaacagctaaaagaacaaggacagtcacttggagaagcacatttatacttcggctgccgttcacctcatgaagactatctgtatcaagaagagcttgaaaacgcccaaagcgaaggcatcattacgcttcataccgctttttctcgcatgccaaatcagccgaaaacatacgttcagcacgtaatggaacaagacggcaagaaattgattgaacttcttgatcaaggagcgcacttctatatctgcggagacggaagccaaatggcacctgccgttgaagcaacgcttatgaaaagctatgctgacgttcaccaagtgagttatgcagacgctcgcttatggctgcagcagctagaagaaaaaggccgatacgcaaaagacgtgtgggctggg

SEQ ID NO: 508 - protein, 1049 aa, synthetic construct
  REGION 1..1049: note = Variant of cytochrome P450
MTIKEMPQPKTFGELKNLPLLNTDKPVQALMRIADELGEIFKFEAPGSVTRFLSSQRLIKEACDERRFDKNLSQSLKFARDFLGDGLFTSWTHEPNWKKAHNILGPSFSQRAMKRYHAMMVDIAVQLVQKWERLNADEHIEVSEDMTRLTLDTIGLCGFNYRFNSFYRDQPHPFIVSVVRALDEIMNKLQRANPDDPAYDENKRQCQEDIKVMNDYVDKIIADRKARGEQSHDLLTQMLNGKDPETGEPLDDGNIRYQIITFLIAGHETTSGLLSFALYFLVKNPHVLQKVAEEAARVLVDPVPSYKQVKQLKYVGMVLNEALRLWPTGPAFSLYAKEDTVLGGEYPLTKGDEVMVLIPQLHRDKTIWGDDVEEFRPERFENPSAIPQHAFKPFGNGQRACIGQQFALHEATLVLGMMLKHFDFEDHTNYELVIKERLTLKPEGFVVKAKSKGIPLGLIPSPSTEQSAKKVRKKAENAHNTPLLVLYGSNAGTAEGTARDLADIAMSKGFAPQVATLDSHAGNLPREGAVLIVTASYNGHPPDNAKQFVDWLDQASADEVKGVRYSVFGCGDKNWAATYQKVPAFIDETLAAKGAENIADMGEGDASDDFEGAYEEWSDHMWSDVAAYFNLDIENSEDNKSTLSLQFVDSAADMPLAKMHGAFSTNVVASKELQQPGSARSTRHLEIELPKEASYQEGDHLGVIPRNYEGIVNRVTARFGLSASQLIRLEAEEEKLAHLPLAKTVSVEELLQYVELQDPVTRTQLRAMAAKTVCPPHKVELEALLEKQAYKEQVLAKRLTMLELLEKYPACEMKFSEFIALLPSIRPRYYSISSSPRVDEKQASITVSVVSGDAWSGYGEYKGIASNYLAELQEGDTITCFISTDQSEFTLPKDPETPLIMVGPGTGVAPFRGFVQARKQLKEQGQSLGEAHLYFGCRSPHEDYLYQEELENAQSEGIITLHTAFSRMPNQPKTYVQHVMEQDGKKLIELLDQGAHFYICGDGSQMAPAVEATLMKSYADVHQVSYADARLWLQQLEEKGRYAKDVWAG

SEQ ID NO: 509 - DNA, 3147 bp, synthetic construct
  misc_feature 1..3147: note = Variant of cytochrome P450
  source 1..3147: mol_type = other DNA
atgacaattaaggaaatgcctcagcctaagacgtttggagaacttaaaaatttaccgttattaaacacagataaaccggttcaagctttgatgcgtattgcggatgaattaggagaaatctttaaattcgaggcgcctggtagcgtaacgcgctttttatcaagtcagcgtctaattaaagaagcatgcgatgaacgtcgctttgataaaaacttaagtcaatcgctgaaatttgcccgtgattttctgggagacgggttatttacaagctggacgcatgaaccgaattggaaaaaagcgcataatatcttaggcccaagctttagtcagcatgcaatgggccgttatcatgcgatgatggtcgatatcgccgtgcagcttgttcaaaagtgggagcgtctaaatgcagatgagcatattgaagtatcggaagacatgacacgtttaacgctggatacaattggtctttgcggcttcaactatcgctttaacagcttttaccgagatcagcctcatccatttattgtgtcggtagtgcgtctgctggatgaaatcatgaacaagctgcagcgagcaaatccagacgacccagcttatgatgaaaacaagcgccagtgtcaagaagatatcaaggtgatgaacgactatgtcgataaaattattgcagatcgcaaagcaaggggtgaacaaagccatgatttattaacgcagatgctaaacggaaaagatccagaaacgggtgagccgcttgatgacgggaacattcgttatcaaattattacattcttaatcgcgggacacgaaacaacaagtggtcttttatcatttgcgctgtatttcttagtgaaaaatccacatgtattacaaaaagtagcagaagaagcagcacgagttctagtagatcctgttccaagctacaaacaagtcaaacagcttaaatatgtcggcatggtcttaaacgaagcgctgcgcttatggccaactggtcctgcgttttccctatatgcaaaagaagatacggtgcttggaggagaatatcctttaaccaaaggcgacgaagtaatggttctgattcctcagcttcaccgtgataaaacaatttggggagacgatgtggaggaattccgtccagagcgttttgaaaatccaagtgcgattccgcagcatgcgtttaaaccgtttggaaacggtcagcgtgcgtgtatcggtcagcagttcgctcttcatgaagcaacgctggtacttggtatgatgctaaaacactttgactttgaagatcatacaaactacgagctcgttattaaggaacgcttaacgttaaaacctgaaggctttgtggtaaaagcaaaatcgaaaggcattccgcttggcctgattccttcacctagcactgaacagtctgctaaaaaagtacgcaaaaaggcagaaaacgctcataatacgccgctgcttgtgctatacggttcaaatgcgggaacagctgaaggaacggcgcgtgatttagcagatattgcaatgagcaaaggatttgcaccgcaggtcgcaacgcttgattcacacgccggaaatcttccgcgcgaaggagctgtattaattgtaacggcgtcttataacggtcatccgcctgataacgcaaagcaatttgtcgactggttagaccaagcgtctgctgatgaagtaaaaggcgttcgctactccgtatttggatgcggcgataaaaactgggctgcgacgtatcaaaaagtgcctgcttttatcgatgaaacgcttgccgctaaaggggcagaaaacatcgctgacatgggtttcggtgatgcaagcgacgactttgaaggcacttatgaagaatggagtgatcatatgtggagcgacgtagcagcctactttaacctcgacattgaaaacagtgaagataataaatctactctttcacttcaatttgtcgacagcgccgcggatatgccgcttgcgaaaatgcacggtgcgttttcaacgaacgtcgtagcaagcaaagaacttcaacagccaggcagtgcacgaagcacgcgacatcttgaaattgaacttccaaaagaagcttcttatcaagaaggagatcatttaggtgttattcctcgcaactatgaaggaatagtaaaccgtgtaacagcaaggttcggcctaagcgcatcacagcagatccgtctggaagcagaagaagaaaaattagctcatttgccactcgctaaaacagtatccgtagaagagcttctgcaatacgtggagcttcaagatcctgttacgcgcacgcagcttcgcgcaatggctgctaaaacggtctgcccgccgcataaagtagagcttgaagccttgcttgaaaagcaagcctacaaagaacaagtgctggcaaaacgtttaacaatgcttgaactgcttgaaaaatacccggcgtgtgaaatgaaattcagcgaatttatcgcccttctgccaagcatacgcccgcgctattactcgatttcttcatcacctcgtgtcgatgaaaaacaagcaagcatcacggtcagcgttgtctcaggaccagcgtggagcggatatggagaatataaaggaattgcgtcgaactatcttgccgagctgcaagaaggagatacgattacgtgctttatttccacagatcagtcagaatttacgctgccaaaagaccctctgactccgcttatcatggtcggaccgggaacaggcgtcgcgccgtttagaggctttgtgcaggcgcgcaaacagctaaaagaacaaggacagtcacttggagaagcacatttatacttcggctgccgttcacctcatgaagactatctgtatcaagaagagcttgaaaacgcccaaagcgaaggcatcattacgcttcataccgctttttctcgcatgccaaatcagccgaaaacatacgttcagcacgtaatggaacaagacggcaagaaattgattgaacttcttgatcaaggagcgcacttctatatctgcggagacggaagccaaatggcacctgccgttgaagcaacgcttatgaaaagctatgctgacgttcaccaagtgagttatgcagacgctcgcttatggctgcagcagctagaagaaaaaggccgatacgcaaaagacgtgtgggctggg

SEQ ID NO: 510 - protein, 1049 aa, synthetic construct
  REGION 1..1049: note = Variant of cytochrome P450
MTIKEMPQPKTFGELKNLPLLNTDKPVQALMRIADELGEIFKFEAPGSVTRFLSSQRLIKEACDERRFDKNLSQSLKFARDFLGDGLFTSWTHEPNWKKAHNILGPSFSQHAMGRYHAMMVDIAVQLVQKWERLNADEHIEVSEDMTRLTLDTIGLCGFNYRFNSFYRDQPHPFIVSVVRLLDEIMNKLQRANPDDPAYDENKRQCQEDIKVMNDYVDKIIADRKARGEQSHDLLTQMLNGKDPETGEPLDDGNIRYQIITFLIAGHETTSGLLSFALYFLVKNPHVLQKVAEEAARVLVDPVPSYKQVKQLKYVGMVLNEALRLWPTGPAFSLYAKEDTVLGGEYPLTKGDEVMVLIPQLHRDKTIWGDDVEEFRPERFENPSAIPQHAFKPFGNGQRACIGQQFALHEATLVLGMMLKHFDFEDHTNYELVIKERLTLKPEGFVVKAKSKGIPLGLIPSPSTEQSAKKVRKKAENAHNTPLLVLYGSNAGTAEGTARDLADIAMSKGFAPQVATLDSHAGNLPREGAVLIVTASYNGHPPDNAKQFVDWLDQASADEVKGVRYSVFGCGDKNWAATYQKVPAFIDETLAAKGAENIADMGFGDASDDFEGTYEEWSDHMWSDVAAYFNLDIENSEDNKSTLSLQFVDSAADMPLAKMHGAFSTNVVASKELQQPGSARSTRHLEIELPKEASYQEGDHLGVIPRNYEGIVNRVTARFGLSASQQIRLEAEEEKLAHLPLAKTVSVEELLQYVELQDPVTRTQLRAMAAKTVCPPHKVELEALLEKQAYKEQVLAKRLTMLELLEKYPACEMKFSEFIALLPSIRPRYYSISSSPRVDEKQASITVSVVSGPAWSGYGEYKGIASNYLAELQEGDTITCFISTDQSEFTLPKDPLTPLIMVGPGTGVAPFRGFVQARKQLKEQGQSLGEAHLYFGCRSPHEDYLYQEELENAQSEGIITLHTAFSRMPNQPKTYVQHVMEQDGKKLIELLDQGAHFYICGDGSQMAPAVEATLMKSYADVHQVSYADARLWLQQLEEKGRYAKDVWAG

SEQ ID NO: 511 - DNA, 3147 bp, synthetic construct
  misc_feature 1..3147: note = Variant of cytochrome P450
  source 1..3147: mol_type = other DNA
atgacaattaaggaaatgcctcagcctaagacgtttggagaacttaaaaatttaccgttattaaacacagataaaccggttcaagctttgatgcgtattgcggatgaattaggagaaatctttaaattcgaggcgcctggtagcgtaacgcgctttttatcaagtcagcgtctaattaaagaagcatgcgatgaacgtcgctttgataaaaacttaagtcaatcgctgaaatttgcccgtgattttctgggagacgggttatttacaagctggacgcatgaaccgaattggaaaaaagcgcataatatcttaggcccaagctttagtcagctggcaatgcgccgttatcatgcgatgatggtcgatatcgccgtgcagcttgttcaaaagtgggagcgtctaaatgcagatgagcatattgaagtatcggaagacatgacacgtttaacgctggatacaattggtctttgcggcttcaactatcgctttaacagcttttaccgagatcagcctcatccatttattgtggcggtagtgcgtctgctggatgaagtcatgaacaagctgcagcgagcaaatccagacgacccagcttatgatgaaaacaagcgccagtgccaagaagatatcaaggtgatgaacgactatgtcgataaaattattgcagatcgcaaagcaaggggtgaacaaagccatgatttattaacgcagatgctaaacggaaaagatccagaaacgggtgagccgcttgatgacgggaacattcgttatcaaattattacattcttaatcgcgggacacgaaacaacaagtggtcttttatcatttgcgctgtatttcttagtgaaaaatccacatgtattacaaaaagtagcagaagaagcagcacgagttctagtagatcctgttccaagctacaaacaagtcaaacagcttaaatatgtcggcatggtcttaaacgaagcgctgcgcttatggccaactggtcctgcgttttccctatatgcaaaagaagatacggtgcttggaggagaatatcctttaaccaaaggcgacgaagtaatggttctgattcctcagcttcaccgtgataaaacaatttggggagacgatgtggagtcgttccgtccagagcgttttgaaaatccaagtgcgattccgcagcatgcgtttaaaccgtttggaaacggtcagcgtgcgtgtatcggtcagcagttcgctcttcatgaagcaacgctggtacttggtatgatgctaaaacactttgactttgaagatcatacaaactacgagctcgttattaaggaacgcttaacgttaaaacctgaaggctttgtggtaaaagcaaaatcgaaaggcattccgcttggcctgattccttcacctagcactgaacagtctgctaaaaaagtacgcaaaaaggcagaaaacgctcataatacgccgctgcttgtgctatacggttcaaatgcgggaacagctgaaggaacggcgcgtgatttagcagatattgcaatgagcaaaggatttgcaccgcaggtcgcaacgcttgattcacacgccggaaatcttccgcgcgaaggagctgtattaattgtaacggcgtcttataacggtcatccgcctgataacgcaaagcaatttgtcgactggttagaccaagcgtctgctgatgaagtaaaaggcgttcgctactccgtatttggatgcggcgataaaaactgggctgcgacgtatcaaaaagtgcctgcttttatcgatgaaacgcttgccgctaaaggggcagaaaacatcgctgaccgcggtttcgctgatgcaagcgacgactttgaaggcgcttatgaagaatggagtgatcatatgtggagtgacgtagcagcctactttaacctcgacattgaaaacagtgaagataataaatctactctttcacttcaatttgtcgacagcgccgcggatatgccgcttgcgaaaatgcacggtgcgttttcaacgaacgtcgtagcaagcaaagaacttcaacagccaggcagtgcacgaagcacgcgacatcttgaaattgaacttccaaaagaagcttcttatcaagaaggagatcatttaggtgttattcctcgcaactatgaaggaatagtaaaccgtgtaacagcaaggttcggcctaagcgcatcacagcagatccgtctggaagcagaagaagaaaaattagctcatttgccactcgctaaaacagtatccgtagaagagcttctgcaatacgtggagcttcaagatcctgttacgcgcacgcagcttcgcgcaatggctgctaaaacggtctgcccgccgcataaagtagagcttgaagccttgcttgaaaagcaagcctacaaagaacaagtgctggcaaaacgtttaacaatgcttgaactgcttgaaaaatacccggcgtgtgaaatgaaattcagcgaatttatcgcccttctgccaagcatacgcccgcgctattactcgatttcttcatcacctcgtgtcgatgaaaaacaagcaagcatcacggtcagcgttgtctcaggagacgcgtggagcggatatggagaatataaaggaattgcgtcgaactatcttgccgagctgcaagaaggagatacgattacgtgctttatttccacagatcagtcagaatttacgctgccaaaagaccctgaagtgccgcttatcatggtcggaccgggaacaggcgtcgcgccgtttagaggctttgtgcaggcgcgcaaacagctaaaagaacaaggacagtcacttggagaagcacatttatacttcggctgccgttcacctcatgaagactatctgtatcaagaagagcttgaaaacgcccaaagcgaaggcatcattacgcttcataccgctttttctcgcatgccaaatcagccgaaaacatacgttcagcacgtaatggaacaagacggcaagaaattgattgaacttcttgatcaaggagcgcacttctattgttgcggagacggaagccaaatggcacctgccgttgaagcaacgcttatgaaaagctatgctgacgttcaccaagtgagtgaggcagacgctcgcttatggctgcagcagctagaagaaaaaggccgatacgcaaaagacgtgtgggctggg

SEQ ID NO: 512 - protein, 1049 aa, synthetic construct
  REGION 1..1049: note = Variant of cytochrome P450
MTIKEMPQPKTFGELKNLPLLNTDKPVQALMRIADELGEIFKFEAPGSVTRFLSSQRLIKEACDERRFDKNLSQSLKFARDFLGDGLFTSWTHEPNWKKAHNILGPSFSQLAMRRYHAMMVDIAVQLVQKWERLNADEHIEVSEDMTRLTLDTIGLCGFNYRFNSFYRDQPHPFIVAVVRLLDEVMNKLQRANPDDPAYDENKRQCQEDIKVMNDYVDKIIADRKARGEQSHDLLTQMLNGKDPETGEPLDDGNIRYQIITFLIAGHETTSGLLSFALYFLVKNPHVLQKVAEEAARVLVDPVPSYKQVKQLKYVGMVLNEALRLWPTGPAFSLYAKEDTVLGGEYPLTKGDEVMVLIPQLHRDKTIWGDDVESFRPERFENPSAIPQHAFKPFGNGQRACIGQQFALHEATLVLGMMLKHFDFEDHTNYELVIKERLTLKPEGFVVKAKSKGIPLGLIPSPSTEQSAKKVRKKAENAHNTPLLVLYGSNAGTAEGTARDLADIAMSKGFAPQVATLDSHAGNLPREGAVLIVTASYNGHPPDNAKQFVDWLDQASADEVKGVRYSVFGCGDKNWAATYQKVPAFIDETLAAKGAENIADRGFADASDDFEGAYEEWSDHMWSDVAAYFNLDIENSEDNKSTLSLQFVDSAADMPLAKMHGAFSTNVVASKELQQPGSARSTRHLEIELPKEASYQEGDHLGVIPRNYEGIVNRVTARFGLSASQQIRLEAEEEKLAHLPLAKTVSVEELLQYVELQDPVTRTQLRAMAAKTVCPPHKVELEALLEKQAYKEQVLAKRLTMLELLEKYPACEMKFSEFIALLPSIRPRYYSISSSPRVDEKQASITVSVVSGDAWSGYGEYKGIASNYLAELQEGDTITCFISTDQSEFTLPKDPEVPLIMVGPGTGVAPFRGFVQARKQLKEQGQSLGEAHLYFGCRSPHEDYLYQEELENAQSEGIITLHTAFSRMPNQPKTYVQHVMEQDGKKLIELLDQGAHFYCCGDGSQMAPAVEATLMKSYADVHQVSEADARLWLQQLEEKGRYAKDVWAG

SEQ ID NO: 513 - DNA, 3147 bp, synthetic construct
  misc_feature 1..3147: note = Variant of cytochrome P450
  source 1..3147: mol_type = other DNA
atgacaattaaggaaatgcctcagcctaagacgtttggagaacttaaaaatttaccgttattaaacacagataaaccggttcaagctttgatgcgtattgcggatgaattaggagaaatctttaaattcgaggcgcctggtagcgtaacgcgctttttatcaagtcagcgtctaattaaagaagcatgcgatgaacgtcgctttgataaaaacttaagtcaatcgctgaaatttgcccgtgattttctgggagacgggttatttacaagctggacgcatgaaccgaattggaaaaaagcgcataatatcttaggcccaagctttagtcagcatgcaatgggccgttatcatgcgatgatggtcgatatcgccgtgcagcttgttcaaaagtgggagcgtctaaatgcagatgagcatattgaagtatcggaagacatgacacgtttaacgctggatacaattggtctttgcggcttcaactatcgctttaacagcttttaccgagatcagcctcatccatttattgtgtcggtagtgcgtctgctggatgaagtcatgaacaagctgcagcgagcaaatccagacgacccagcttatgatgaaaacaagcgccagtgtcaagaagatatcaaggtgatgaacgactatgtcgataaaattattgcagatcgcaaagcaaggggtgaacaaagccatgatttattaacgcagatgctaaacggaaaagatccagaaacgggtgagccgcttgatgacgggaacattcgttatcaaattattacattcttaatcgcgggacacgaaacaacaagtggtcttttatcatttgcgctgtatttcttagtgaaaaatccacatgtattacaaaaagtagcagaagaagcagcacgagttctagtagatcctgttccaagctacaaacaagtcaaacagcttaaatatgtcggcatggtcttaaacgaagcgctgcgcttatggccaactggtcctgcgttttccctatatgcaaaagaagatacggtgcttggaggagaatatcctttaaccaaaggcgacgaagtaatggttctgattcctcagcttcaccgtgataaaacaatttggggagacgatgtggaggaattccgtccagagcgttttgaaaatccaagtgcgattccgcagcatgcgtttaaaccgtttggaaacggtcagcgtgcgtgtatcggtcagcagttcgctcttcatgaagcaacgctggtacttggtatgatgctaaaacactttgactttgaagatcatacaaactacgagctcgttattaaggaacgcttaacgttaaaacctgaaggctttgtggtaaaagcaaaatcgaaaggcattccgcttggcctgattccttcacctagcactgaacagtctgctaaaaaagtacgcaaaaaggcagaaaacgctcataatacgccgctgcttgtgctatacggttcaaatgcgggaacagctgaaggaacggcgcgtgatttagcagatattgcaatgagcaaaggatttgcaccgcaggtcgcaacgcttgattcacacgccggaaatcttccgcgcgaaggagctgtattaattgtaacggcgtcttataacggtcatccgcctgataacgcaaagcaatttgtcgactggttagaccaagcgtctgctgatgaagtaaaaggcgttcgctactccgtatttggatgcggcgataaaaactgggctgcgacgtatcaaaaagtgcctgcttttatcgatgaaacgcttgccgctaaaggggcagaaaacatcgctgacatgggtgaggctgatgcaagcgacgactttgaaggcgcttatgaagaatggagtgatcatatgtggagtgacgtagcagcctactttaacctcgacattgaaaacagtgaagataataaatctactctttcacttcaatttgtcgacagcgccgcggatatgccgcttgcgaaaatgcacggtgcgttttcaacgaacgtcgtagcaagcaaagaacttcaacagccaggcagtgcacgaagcacgcgacatcttgaaattgaacttccaaaagaagcttcttatcaagaaggagatcatttaggtgttattcctcgcaactatgaaggaatagtaaaccgtgtaacagcaaggttcggcctaagcgcatcacagcagatccgtctggaagcagaagaagaaaaattagctcatttgccactcgctaaaacagtatccgtagaagagcttctgcaatacgtggagcttcaagatcctgttacgcgcacgcagcttcgcgcaatggctgctaaaacggtctgcccgccgcataaagtagagcttgaagccttgcttgaaaagcaagcctacaaagaacaagtgctggcaaaacgtttaacaatgcttgaactgcttgaaaaatacccggcgtgtgaaatgaaattcagcgaatttatcgcccttctgccaagcatacgcccgcgctattactcgatttcttcatcacctcgtgtcgatgaaaaacaagcaagcatcacggtcagcgttgtctcaggaccagcgtggagcggatatggagaatataaaggaattgcgtcgaactatcttgccgagctgcaagaaggagatacgattacgtgctttatttccacagatcagtcagaatttacgctgccaaaagaccctctggtgccgcttatcatggtcggaccgggaacaggcgtcgcgccgtttagaggctttgtgcaggcgcgcaaacagctaaaagaacaaggacagtcacttggagaagcacatttatacttcggctgccgttcacctcatgaagactatctgtatcaagaagagcttgaaaacgcccaaagcgaaggcatcattacgcttcataccgctttttctcgcatgccaaatcagccgaaaacatacgttcagcacgtaatggaacaagacggcaagaaattgattgaacttcttgatcaaggagcgcacttctattgttgcggagacggaagccaaatggcacctgccgttgaagcaacgcttatgaaaagctatgctgacgttcaccaagtgagtgaagcagacgctcgcttatggctgcagcagctagaagaaaaaggccgatacgcaaaagacgtgtgggctggg

SEQ ID NO: 514 - protein, 1049 aa, synthetic construct
  REGION 1..1049: note = Variant of cytochrome P450
MTIKEMPQPKTFGELKNLPLLNTDKPVQALMRIADELGEIFKFEAPGSVTRFLSSQRLIKEACDERRFDKNLSQSLKFARDFLGDGLFTSWTHEPNWKKAHNILGPSFSQHAMGRYHAMMVDIAVQLVQKWERLNADEHIEVSEDMTRLTLDTIGLCGFNYRFNSFYRDQPHPFIVSVVRLLDEVMNKLQRANPDDPAYDENKRQCQEDIKVMNDYVDKIIADRKARGEQSHDLLTQMLNGKDPETGEPLDDGNIRYQIITFLIAGHETTSGLLSFALYFLVKNPHVLQKVAEEAARVLVDPVPSYKQVKQLKYVGMVLNEALRLWPTGPAFSLYAKEDTVLGGEYPLTKGDEVMVLIPQLHRDKTIWGDDVEEFRPERFENPSAIPQHAFKPFGNGQRACIGQQFALHEATLVLGMMLKHFDFEDHTNYELVIKERLTLKPEGFVVKAKSKGIPLGLIPSPSTEQSAKKVRKKAENAHNTPLLVLYGSNAGTAEGTARDLADIAMSKGFAPQVATLDSHAGNLPREGAVLIVTASYNGHPPDNAKQFVDWLDQASADEVKGVRYSVFGCGDKNWAATYQKVPAFIDETLAAKGAENIADMGEADASDDFEGAYEEWSDHMWSDVAAYFNLDIENSEDNKSTLSLQFVDSAADMPLAKMHGAFSTNVVASKELQQPGSARSTRHLEIELPKEASYQEGDHLGVIPRNYEGIVNRVTARFGLSASQQIRLEAEEEKLAHLPLAKTVSVEELLQYVELQDPVTRTQLRAMAAKTVCPPHKVELEALLEKQAYKEQVLAKRLTMLELLEKYPACEMKFSEFIALLPSIRPRYYSISSSPRVDEKQASITVSVVSGPAWSGYGEYKGIASNYLAELQEGDTITCFISTDQSEFTLPKDPLVPLIMVGPGTGVAPFRGFVQARKQLKEQGQSLGEAHLYFGCRSPHEDYLYQEELENAQSEGIITLHTAFSRMPNQPKTYVQHVMEQDGKKLIELLDQGAHFYCCGDGSQMAPAVEATLMKSYADVHQVSEADARLWLQQLEEKGRYAKDVWAG

SEQ ID NO: 515 - DNA, 3147 bp, synthetic construct
  misc_feature 1..3147: note = Variant of cytochrome P450
  source 1..3147: mol_type = other DNA
atgacaattaaggaaatgcctcagcctaagacgtttggagaacttaaaaatttaccgttattaaacacagataaaccggttcaagctttgatgcgtattgcggatgaattaggagaaatctttaaattcgaggcgcctggtagcgtaacgcgctttttatcaagtcagcgtctaattaaagaagcatgcgatgaacgtcgctttgataaaaacttaagtcaatcgctgaaatttgcccgtgattttctgggagacgggttatttacaagctggacgcatgaaccgaattggaaaaaagcgcataatatcttaggcccaagctttagtcagcgtgcaatgaaacgttatcatgcgatgatggtcgatatcgccgtgcagcttgttcaaaagtgggagcgtctaaatgcagatgagcatattgaagtatcggaagacatgacacgtttaacgctggatacaattggtctttgcggcttcaactatcgctttaacagcttttaccgagatcagcctcatccatttattgtggcggtagtgcgtctgctggatgaaatcatgaacaagctgcagcgagcaaatccagacgacccagcttatgatgaaaacaagcgccagtgccaagaagatatcaaggtgatgaacgactatgtcgataaaattattgcagatcgcaaagcaaggggtgaacaaagccatgatttattaacgcagatgctaaacggaaaagatccagaaacgggtgagccgcttgatgacgggaacattcgttatcaaattattacattcttaatcgcgggacacgaaacaacaagtggtcttttatcatttgcgctgtatttcttagtgaaaaatccacatgtattacaaaaagtagcagaagaagcagcacgagttctagtagatcctgttccaagctacaaacaagtcaaacagcttaaatatgtcggcatggtcttaaacgaagcgctgcgcttatggccaactggtcctgcgttttccctatatgcaaaagaagatacggtgcttggaggagaatatcctttaaccaaaggcgacgaagtaatggttctgattcctcagcttcaccgtgataaaacaatttggggagacgatgtggagtcgttccgtccagagcgttttgaaaatccaagtgcgattccgcagcatgcgtttaaaccgtttggaaacggtcagcgtgcgtgtatcggtcagcagttcgctcttcatgaagcaacgctggtacttggtatgatgctaaaacactttgactttgaagatcatacaaactacgagctcgttattaaggaacgcttaacgttaaaacctgaaggctttgtggtaaaagcaaaatcgaaaggcattccgcttggcctgattccttcacctagcactgaacagtctgctaaaaaagtacgcaaaaaggcagaaaacgctcataatacgccgctgcttgtgctatacggttcaaatgcgggaacagctgaaggaacggcgcgtgatttagcagatattgcaatgagcaaaggatttgcaccgcaggtcgcaacgcttgattcacacgccggaaatcttccgcgcgaaggagctgtattaattgtaacggcgtcttataacggtcatccgcctgataacgcaaagcaatttgtcgactggttagaccaagcgtctgctgatgaagtaaaaggcgttcgctactccgtatttggatgcggcgataaaaactgggctgcgacgtatcaaaaagtgcctgcttttatcgatgaaacgcttgccgctaaaggggcagaaaacatcgctgacatgggtgagggtgatgcaagcgacgactttgaaggcacttatgaagaatggagtgatcatatgtggagtgacgtagcagcctactttaacctcgacattgaaaacagtgaagataataaatctactctttcacttcaatttgtcgacagcgccgcggatatgccgcttgcgaaaatgcacggtgcgttttcaacgaacgtcgtagcaagcaaagaacttcaacagccaggcagtgcacgaagcacgcgacatcttgaaattgaacttccaaaagaagcttcttatcaagaaggagatcatttaggtgttattcctcgcaactatgaaggaatagtaaaccgtgtaacagcaaggttcggcctaagcgcatcacagcaaatccgtctggaagcagaagaagaaaaattagctcatttgccactcgctaaaacagtatccgtagaagagcttctgcaatacgtggagcttcaagatcctgttacgcgcacgcagcttcgcgcaatggctgctaaaacggtctgcccgccgcataaagtagagcttgaagccttgcttgaaaagcaagcctacaaagaacaagtgctggcaaaacgtttaacaatgcttgaactgcttgaaaaatacccggcgtgtgaaatgaaattcagcgaatttatcgcccttctgccaagcatacgcccgcgctattactcgatttcttcatcacctcgtgtcgatgaaaaacaagcaagcatcacggtcagcgttgtctcaggaccagcgtggagcggatatggagaatataaaggaattgcgtcgaactatcttgccgagctgcaagaaggagatacgattacgtgctttatttccacagatcagtcagaatttacgctgccaaaagaccctgaaacgccgcttatcatggtcggaccgggaacaggcgtcgcgccgtttagaggctttgtgcaggcacgcaaacagctaaaagaacaaggacagtcacttggagaagcacatttatacttcggctgccgttcacctcatgaagactatctgtatcaagaagagcttgaaaacgcccaaagcgaaggcatcattacgcttcataccgctttttctcgcatgccaaatcagccgaaaacatacgttcagcacgtaatggaacaagacggcaagaaattgattgaacttcttgatcaaggagcgcacttctatatttgcggagacggaagccaaatggcacctgccgttgaagcaacgcttatgaaaagctatgctgacgttcaccaagtgagtgaagcagacgctcgcttatggctgcagcagctagaagaaaaaggccgatacgcaaaagacgtgtgggctggg

SEQ ID NO: 516 - protein, 1049 aa, synthetic construct
  REGION 1..1049: note = Variant of cytochrome P450
MTIKEMPQPKTFGELKNLPLLNTDKPVQALMRIADELGEIFKFEAPGSVTRFLSSQRLIKEACDERRFDKNLSQSLKFARDFLGDGLFTSWTHEPNWKKAHNILGPSFSQRAMKRYHAMMVDIAVQLVQKWERLNADEHIEVSEDMTRLTLDTIGLCGFNYRFNSFYRDQPHPFIVAVVRLLDEIMNKLQRANPDDPAYDENKRQCQEDIKVMNDYVDKIIADRKARGEQSHDLLTQMLNGKDPETGEPLDDGNIRYQIITFLIAGHETTSGLLSFALYFLVKNPHVLQKVAEEAARVLVDPVPSYKQVKQLKYVGMVLNEALRLWPTGPAFSLYAKEDTVLGGEYPLTKGDEVMVLIPQLHRDKTIWGDDVESFRPERFENPSAIPQHAFKPFGNGQRACIGQQFALHEATLVLGMMLKHFDFEDHTNYELVIKERLTLKPEGFVVKAKSKGIPLGLIPSPSTEQSAKKVRKKAENAHNTPLLVLYGSNAGTAEGTARDLADIAMSKGFAPQVATLDSHAGNLPREGAVLIVTASYNGHPPDNAKQFVDWLDQASADEVKGVRYSVFGCGDKNWAATYQKVPAFIDETLAAKGAENIADMGEGDASDDFEGTYEEWSDHMWSDVAAYFNLDIENSEDNKSTLSLQFVDSAADMPLAKMHGAFSTNVVASKELQQPGSARSTRHLEIELPKEASYQEGDHLGVIPRNYEGIVNRVTARFGLSASQQIRLEAEEEKLAHLPLAKTVSVEELLQYVELQDPVTRTQLRAMAAKTVCPPHKVELEALLEKQAYKEQVLAKRLTMLELLEKYPACEMKFSEFIALLPSIRPRYYSISSSPRVDEKQASITVSVVSGPAWSGYGEYKGIASNYLAELQEGDTITCFISTDQSEFTLPKDPETPLIMVGPGTGVAPFRGFVQARKQLKEQGQSLGEAHLYFGCRSPHEDYLYQEELENAQSEGIITLHTAFSRMPNQPKTYVQHVMEQDGKKLIELLDQGAHFYICGDGSQMAPAVEATLMKSYADVHQVSEADARLWLQQLEEKGRYAKDVWAG

SEQ ID NO: 517 - DNA, 3147 bp, synthetic construct
  misc_feature 1..3147: note = Variant of cytochrome P450
  source 1..3147: mol_type = other DNA
atgacaattaaggaaatgcctcagcctaagacgtttggagaacttaaaaatttaccgttattaaacacagataaaccggttcaagctttgatgcgtattgcggatgaattaggagaaatctttaaattcgaggcgcctggtagcgtaacgcgctttttatcaagtcagcgtctaattaaagaagcatgcgatgaaagtcgctttgataaaaacttaagtcaatcgctgaaatttgcccgtgattttctgggagacgggttatttacaagctggacgcatgaaccgaattggaaaaaagcgcataatatcttaggcccaagctttagtcagctggcaatgcgccgttatcatgcgatgatggtcgatatcgccgtgcagcttgttcaaaagtgggagcgtctaaatgcagatgagcatattgaagtatcggaagacatgacacgtttaacgctggatacaattggtctttgcggcttcaactatcgctttaacagcttttaccgagatcagcctcatccatttattgtgtcggtagtgcgtctgctggatgaaatcatgaacaagctgcagcgagcaaatccagacgacccagcttatgatgaaaacaagcgccagtgccaagaagatatcaaggtgatgaacgactatgtcgataaaattattgcagatcgcaaagcaaggggtgaacaaagccatgatttattaacgcagatgctaaacggaaaagatccagaaacgggtgagccgcttgatgacgggaacattcgttatcaaattattacattcttaatcgcgggacacgaaacaacaagtggtcttttatcatttgcgctgtatttcttagtgaaaaatccacatgtattacaaaaagtagcagaagaagcagcacgagttctagtagatcctgttccaagctacaaacaagtcaaacagcttaaatatgtcggcatggtcttaaacgaagcgctgcgcttatggccaactggtcctgcgttttccctatatgcaaaagaagatacggtgcttggaggagaatatcctttaaccaaaggcgacgaagtaatggttctgattcctcagcttcaccgtgataaaacaatttggggagacgatgtggagtcgttccgtccagagcgttttgaaaatccaagtgcgattccgcagcatgcgtttaaaccgtttggaaacggtcagcgtgcgtgtatcggtcagcagttcgctcttcatgaagcaacgctggtacttggtatgatgctaaaacactttgactttgaagatcatacaaactacgagctcgttattaaggaacgcttaacgttaaaacctgaaggctttgtggtaaaagcaaaatcgaaaggcattccgcttggcctgattccttcacctagcactgaacagtctgctaaaaaagtacgcaaaaaggcagaaaacgctcataatacgccgctgcttgtgctatacggttcaaatgcgggaacagctgaaggaacggcgcgtgatttagcagatattgcaatgagcaaaggatttgcaccgcaggtcgcaacgcttgattcacacgccggaaatcttccgcgcgaaggagctgtattaattgtaacggcgtcttataacggtcatccgcctgataacgcaaagcaatttgtcgactggttagaccaagcgtctgctgatgaagtaaaaggcgttcgctactccgtatttggatgcggcgataaaaactgggctgcgacgtatcaaaaagtgcctgcttttatcgatgaaacgcttgccgctaaaggggcagaaaacatcgctgaccgcggtttcggtgatgcaagcgacgactttgaaggcacttatgaagaatggagtgatcatatgtggagtgacgtagcagcctactttaacctcgacattgaaaacagtgaagataataaatctactctttcacttcaatttgtcgacagcgccgcggatatgccgcttgcgaaaatgcacggtgcgttttcaacgaacgtcgtagcaagcaaagaacttcaacagccaggcagtgcacgaagcacgcgacatcttgaaattgaacttccaaaagaagcttcttatcaagaaggagatcatttaggtgttattcctcgcaactatgaaggaatagtaaaccgtgtaacagcaaggttcggcctaagcgcatcacagcagatccgtctggaagcagaagaagaaaaattagctcatttgccactcgctaaaacagtatccgtagaagagcttctgcaatacgtggagcttcaagatcctgttacgcgcacgcagcttcgcgcaatggctgctaaaacggtctgcccgccgcataaagtagagcttgaagccttgcttgaaaagcaagcctacaaagaacaagtgctggcaaaacgtttaacaatgcttgaactgcttgaaaaatacccggcgtgtgaaatgaaattcagcgaatttatcgcccttctgccaagcatacgcccgcgctattactcgatttcttcatcacctcgtgtcgatgaaaaacaagcaagcatcacggtcagcgttgtctcaggaccagcgtggagcggatatggagaatataaaggaattgcgtcgaactatcttgccgagctgcaagaaggagatacgattacgtgctttatttccacagatcagtcagaatttacgctgccaaaagaccctgaaacgccgcttatcatggtcggaccgggaacaggcgtcgcgccgtttagaggctttgtgcaggcgcgcaaacagctaaaagaacaaggacagtcacttggagaagcacatttatacttcggctgccgttcacctcatgaagactatctgtatcaagaagagcttgaaaacgcccaaagcgaaggcatcattacgcttcataccgctttttctcgcatgccaaatcagccgaaaacatacgttcagcacgtaatggaacaagacggcaagaaattgattgaacttcttgatcaaggagcgcacttctattgttgcggagacggaagccaaatggcacctgccgttgaagcaacgcttatgaaaagctatgctgacgttcaccaagtgagttatgcagacgctcgcttatggctgcagcagctagaagaaaaaggccgatacgcaaaagacgtgtgggctggg

SEQ ID NO: 518 - protein, 1049 aa, synthetic construct
  REGION 1..1049: note = Variant of cytochrome P450
MTIKEMPQPKTFGELKNLPLLNTDKPVQALMRIADELGEIFKFEAPGSVTRFLSSQRLIKEACDESRFDKNLSQSLKFARDFLGDGLFTSWTHEPNWKKAHNILGPSFSQLAMRRYHAMMVDIAVQLVQKWERLNADEHIEVSEDMTRLTLDTIGLCGFNYRFNSFYRDQPHPFIVSVVRLLDEIMNKLQRANPDDPAYDENKRQCQEDIKVMNDYVDKIIADRKARGEQSHDLLTQMLNGKDPETGEPLDDGNIRYQIITFLIAGHETTSGLLSFALYFLVKNPHVLQKVAEEAARVLVDPVPSYKQVKQLKYVGMVLNEALRLWPTGPAFSLYAKEDTVLGGEYPLTKGDEVMVLIPQLHRDKTIWGDDVESFRPERFENPSAIPQHAFKPFGNGQRACIGQQFALHEATLVLGMMLKHFDFEDHTNYELVIKERLTLKPEGFVVKAKSKGIPLGLIPSPSTEQSAKKVRKKAENAHNTPLLVLYGSNAGTAEGTARDLADIAMSKGFAPQVATLDSHAGNLPREGAVLIVTASYNGHPPDNAKQFVDWLDQASADEVKGVRYSVFGCGDKNWAATYQKVPAFIDETLAAKGAENIADRGFGDASDDFEGTYEEWSDHMWSDVAAYFNLDIENSEDNKSTLSLQFVDSAADMPLAKMHGAFSTNVVASKELQQPGSARSTRHLEIELPKEASYQEGDHLGVIPRNYEGIVNRVTARFGLSASQQIRLEAEEEKLAHLPLAKTVSVEELLQYVELQDPVTRTQLRAMAAKTVCPPHKVELEALLEKQAYKEQVLAKRLTMLELLEKYPACEMKFSEFIALLPSIRPRYYSISSSPRVDEKQASITVSVVSGPAWSGYGEYKGIASNYLAELQEGDTITCFISTDQSEFTLPKDPETPLIMVGPGTGVAPFRGFVQARKQLKEQGQSLGEAHLYFGCRSPHEDYLYQEELENAQSEGIITLHTAFSRMPNQPKTYVQHVMEQDGKKLIELLDQGAHFYCCGDGSQMAPAVEATLMKSYADVHQVSYADARLWLQQLEEKGRYAKDVWAG

SEQ ID NO: 519 - DNA, 3147 bp, synthetic construct
  misc_feature 1..3147: note = Variant of cytochrome P450
  source 1..3147: mol_type = other DNA
atgacaattaaggaaatgcctcagcctaagacgtttggagaacttaaaaatttaccgttattaaacacagataaaccggttcaagctttgatgcgtattgcggatgaattaggagaaatctttaaattcgaggcgcctggtagcgtaacgcgctttttatcaagtcagcgtctaattaaagaagcatgcgatgaaagtcgctttgataaaaacttaagtcaatcgctgaaatttgcccgtgattttctgggagacgggttatttacaagctggacgcatgaaccgaattggaaaaaagcgcataatatcttaggcccaagctttagtcagcatgcaatgggccgttatcatgcgatgatggtcgatatcgccgtgcagcttgttcaaaagtgggagcgtctaaatgcagatgagcatattgaagtatcggaagacatgacacgtttaacgctggatacaattggtctttgcggcttcaactatcgctttaacagcttttaccgagatcagcctcatccatttattgtggcggtagtgcgtctgctggatgaaatcatgaacaagctgcagcgagcaaatccagacgacccagcttatgatgaaaacaagcgccagtgtcaagaagatatcaaggtgatgaacgactatgtcgataaaattattgcagatcgcaaagcaaggggtgaacaaagccatgatttattaacgcagatgctaaacggaaaagatccagaaacgggtgagccgcttgatgacgggaacattcgttatcaaattattacattcttaatcgcgggacacgaaacaacaagtggtcttttatcatttgcgctgtatttcttagtgaaaaatccacatgtattacaaaaagtagcagaagaagcagcacgagttctagtagatcctgttccaagctacaaacaagtcaaacagcttaaatatgtcggcatggtcttaaacgaagcgctgcgcttatggccaactggtcctgcgttttccctatatgcaaaagaagatacggtgcttggaggagaatatcctttaaccaaaggcgacgaagtaatggttctgattcctcagcttcaccgtgataaaacaatttggggagacgatgtggagtcgttccgtccagagcgttttgaaaatccaagtgcgattccgcagcatgcgtttaaaccgtttggaaacggtcagcgtgcgtgtatcggtcagcagttcgctcttcatgaagcaacgctggtacttggtatgatgctaaaacactttgactttgaagatcatacaaactacgagctcgttattaaggaacgcttaacgttaaaacctgaaggctttgtggtaaaagcaaaatcgaaaggcattccgcttggcctgattccttcacctagcactgaacagtctgctaaaaaagtacgcaaaaaggcagaaaacgctcataatacgccgctgcttgtgctatacggttcaaatgcgggaacagctgaaggaacggcgcgtgatttagcagatattgcaatgagcaaaggatttgcaccgcaggtcgcaacgcttgattcacacgccggaaatcttccgcgcgaaggagctgtattaattgtaacggcgtcttataacggtcatccgcctgataacgcaaagcaatttgtcgactggttagaccaagcgtctgctgatgaagtaaaaggcgttcgctactccgtatttggatgcggcgataaaaactgggctgcgacgtatcaaaaagtgcctgcttttatcgatgaaacgcttgccgctaaaggggcagaaaacatcgctgacatgggtttcgctgatgcaagcgacgactttgaaggcgcttatgaagaatggagtgatcatatgtggagtgacgtagcagcctactttaacctcgacattgaaaacagtgaagataataaatctactctttcacttcaatttgtcgacagcgccgcggatatgccgcttgcgaaaatgcacggtgcgttttcaacgaacgtcgtagcaagcaaagaacttcaacagccaggcagtgcacgaagcacgcgacatcttgaaattgaacttccaaaagaagcttcttatcaagaaggagatcatttaggtgttattcctcgcaactatgaaggaatagtaaaccgtgtaacagcaaggttcggcctaagcgcatcacagcaaatccgtctggaagcagaagaagaaaaattagctcatttgccactcgctaaaacagtatccgtagaagagcttctgcaatacgtggagcttcaagatcctgttacgcgcacgcagcttcgcgcaatggctgctaaaacggtctgcccgccgcataaagtagagcttgaagccttgcttgaaaagcaagcctacaaagaacaagtgctggcaaaacgtttaacaatgcttgaactgcttgaaaaatacccggcgtgtgaaatgaaattcagcgaatttatcgcccttctgccaagcatacgcccgcgctattactcgatttcttcatcacctcgtgtcgatgaaaaacaagcaagcatcacggtcagcgttgtctcaggaccggcgtggagcggatatggagaatataaaggaattgcgtcgaactatcttgccgagctgcaagaaggagatacgattacgtgctttatttccacagatcagtcagaatttacgctgccaaaagaccctctgactccgcttatcatggtcggaccgggaacaggcgtcgcgccgtttagaggctttgtgcaggcgcgcaaacagctaaaagaacaaggacagtcacttggagaagcacatttatacttcggctgccgttcacctcatgaagactatctgtatcaagaagagcttgaaaacgcccaaagcgaaggcatcattacgcttcataccgctttttctcgcatgccaaatcagccgaaaacatacgttcagcacgtaatggaacaagacggcaagaaattgattgaacttcttgatcaaggagcgcacttctatatttgcggagacggaagccaaatggcacctgccgttgaagcaacgcttatgaaaagctatgctgacgttcaccaagtgagtgaagcagacgctcgcttatggctgcagcagctagaagaaaaaggccgatacgcaaaagacgtgtgggctggg

SEQ ID NO: 520 - protein, 1049 aa, synthetic construct
  REGION 1..1049: note = Variant of cytochrome P450
MTIKEMPQPKTFGELKNLPLLNTDKPVQALMRIADELGEIFKFEAPGSVTRFLSSQRLIKEACDESRFDKNLSQSLKFARDFLGDGLFTSWTHEPNWKKAHNILGPSFSQHAMGRYHAMMVDIAVQLVQKWERLNADEHIEVSEDMTRLTLDTIGLCGFNYRFNSFYRDQPHPFIVAVVRLLDEIMNKLQRANPDDPAYDENKRQCQEDIKVMNDYVDKIIADRKARGEQSHDLLTQMLNGKDPETGEPLDDGNIRYQIITFLIAGHETTSGLLSFALYFLVKNPHVLQKVAEEAARVLVDPVPSYKQVKQLKYVGMVLNEALRLWPTGPAFSLYAKEDTVLGGEYPLTKGDEVMVLIPQLHRDKTIWGDDVESFRPERFENPSAIPQHAFKPFGNGQRACIGQQFALHEATLVLGMMLKHFDFEDHTNYELVIKERLTLKPEGFVVKAKSKGIPLGLIPSPSTEQSAKKVRKKAENAHNTPLLVLYGSNAGTAEGTARDLADIAMSKGFAPQVATLDSHAGNLPREGAVLIVTASYNGHPPDNAKQFVDWLDQASADEVKGVRYSVFGCGDKNWAATYQKVPAFIDETLAAKGAENIADMGFADASDDFEGAYEEWSDHMWSDVAAYFNLDIENSEDNKSTLSLQFVDSAADMPLAKMHGAFSTNVVASKELQQPGSARSTRHLEIELPKEASYQEGDHLGVIPRNYEGIVNRVTARFGLSASQQIRLEAEEEKLAHLPLAKTVSVEELLQYVELQDPVTRTQLRAMAAKTVCPPHKVELEALLEKQAYKEQVLAKRLTMLELLEKYPACEMKFSEFIALLPSIRPRYYSISSSPRVDEKQASITVSVVSGPAWSGYGEYKGIASNYLAELQEGDTITCFISTDQSEFTLPKDPLTPLIMVGPGTGVAPFRGFVQARKQLKEQGQSLGEAHLYFGCRSPHEDYLYQEELENAQSEGIITLHTAFSRMPNQPKTYVQHVMEQDGKKLIELLDQGAHFYICGDGSQMAPAVEATLMKSYADVHQVSEADARLWLQQLEEKGRYAKDVWAG

SEQ ID NO: 521 - DNA, 3147 bp, synthetic construct
  misc_feature 1..3147: note = Variant of cytochrome P450
  source 1..3147: mol_type = other DNA
atgacaattaaggaaatgcctcagcctaagacgtttggagaacttaaaaatttaccgttattaaacacagataaaccggttcaagctttgatgcgtattgcggatgaattaggagaaatctttaaattcgaggcgcctggtagcgtaacgcgctttttatcaagtcagcgtctaattaaagaagcatgcgatgaacgtcgctttgataaaaacttaagtcaatcgctgaaatttgcccgtgattttctgggagacgggttatttacaagctggacgcatgaaccgaattggaaaaaagcgcataatatcttaggcccaagctttagtcagctggcaatgcgccgttatcatgcgatgatggtcgatatcgccgtgcagcttgttcaaaagtgggagcgtctaaatgcagatgagcatattgaagtatcggaagacatgacacgtttaacgctggatacaattggtctttgcggcttcaactatcgctttaacagcttttaccgagatcagcctcatccatttattgtgtcggtagtgcgtctgctggatgaagtcatgaacaagctgcagcgagcaaatccagacgacccagcttatgatgaaaacaagcgccagtgtcaagaagatatcaaggtgatgaacgactatgtcgataaaattattgcagatcgcaaagcaaggggtgaacaaagccatgatttattaacgcagatgctaaacggaaaagatccagaaacgggtgagccgcttgatgacgggaacattcgttatcaaattattacattcttaatcgcgggacacgaaacaacaagtggtcttttatcatttgcgctgtatttcttagtgaaaaatccacatgtattacaaaaagtagcagaagaagcagcacgagttctagtagatcctgttccaagctacaaacaagtcaaacagcttaaatatgtcggcatggtcttaaacgaagcgctgcgcttatggccaactggtcctgcgttttccctatatgcaaaagaagatacggtgcttggaggagaatatcctttaaccaaaggcgacgaagtaatggttctgattcctcagcttcaccgtgataaaacaatttggggagacgatgtggagtcgttccgtccagagcgttttgaaaatccaagtgcgattccgcagcatgcgtttaaaccgtttggaaacggtcagcgtgcgtgtatcggtcagcagttcgctcttcatgaagcaacgctggtacttggtatgatgctaaaacactttgactttgaagatcatacaaactacgagctcgttattaaggaacgcttaacgttaaaacctgaaggctttgtggtaaaagcaaaatcgaaaggcattccgcttggcctgattccttcacctagcactgaacagtctgctaaaaaagtacgcaaaaaggcagaaaacgctcataatacgccgctgcttgtgctatacggttcaaatgcgggaacagctgaaggaacggcgcgtgatttagcagatattgcaatgagcaaaggatttgcaccgcaggtcgcaacgcttgattcacacgccggaaatcttccgcgcgaaggagctgtattaattgtaacggcgtcttataacggtcatccgcctgataacgcaaagcaatttgtcgactggttagaccaagcgtctgctgatgaagtaaaaggcgttcgctactccgtatttggatgcggcgataaaaactgggctgcgacgtatcaaaaagtgcctgcttttatcgatgaaacgcttgccgctaaaggggcagaaaacatcgctgacatgggtgagggtgatgcaagcgacgactttgaaggcacgtatgaagaatggagtgatcatatgtggagtgacgtagcagcctactttaacctcgacattgaaaacagtgaagataataaatctactcttagccttcaatttgtcgacagcgccgcggatatgccgcttgcgaaaatgcacggtgcgttttcaacgaacgtcgtagcaagcaaagaacttcaacagccaggcagtgcacgaagcacgcgacatcttgaaattgaacttccaaaagaagcttcttatcaagaaggagatcatttaggtgttattcctcgcaactatgaaggaatagtaaaccgtgtaacagcaaggttcggcctaagcgcatcacagctgatccgtctggaagcagaagaagaaaaattagctcatttgccactcgctaaaacagtatccgtagaagagcttctgcaatacgtggagcttcaagatcctgttacgcgcacgcagcttcgcgcaatggctgctaaaacggtctgcccgccgcataaagtagagcttgaagccttgcttgaaaagcaagcctacaaagaacaagtgctggcaaaacgtttaacaatgcttgaactgcttgaaaaatacccggcgtgtgaaatgaaattcagcgaatttatcgcccttctgccaagcatacgcccgcgctattactcgatttcttcatcacctcgtgtcgatgaaaaacaagcaagcatcacggtcagcgttgtctcaggaccagcgtggagcggatatggagaatataaaggaattgcgtcgaactatcttgccgagctgcaagaaggagatacgattacgtgctttatttccacagatcagtcagaatttacgctgccaaaagaccctgaaactccgcttatcatggtcggaccgggaacaggcgtcgcgccgtttagaggctttgtgcaggcgcgcaaacagctaaaagaacaaggacagtcacttggagaagcacatttatacttcggctgccgttcacctcatgaagactatctgtatcaagaagagcttgaaaacgcccaaagcgaaggcatcattacgcttcataccgctttttctcgcatgccaaatcagccgaaaacatacgttcagcacgtaatggaacaagacggcaagaaattgattgaacttcttgatcaaggagcgcacttctatatttgcggagacggaagccaaatggcacctgccgttgaagcaacgcttatgaaaagctatgctgacgttcaccaagtgagttatgcagacgctcgcttatggctgcagcagctagaagaaaaaggccgatacgcaaaagacgtgtgggctggg

SEQ ID NO: 522 - protein, 1049 aa, synthetic construct
  REGION 1..1049: note = Variant of cytochrome P450
MTIKEMPQPKTFGELKNLPLLNTDKPVQALMRIADELGEIFKFEAPGSVTRFLSSQRLIKEACDERRFDKNLSQSLKFARDFLGDGLFTSWTHEPNWKKAHNILGPSFSQLAMRRYHAMMVDIAVQLVQKWERLNADEHIEVSEDMTRLTLDTIGLCGFNYRFNSFYRDQPHPFIVSVVRLLDEVMNKLQRANPDDPAYDENKRQCQEDIKVMNDYVDKIIADRKARGEQSHDLLTQMLNGKDPETGEPLDDGNIRYQIITFLIAGHETTSGLLSFALYFLVKNPHVLQKVAEEAARVLVDPVPSYKQVKQLKYVGMVLNEALRLWPTGPAFSLYAKEDTVLGGEYPLTKGDEVMVLIPQLHRDKTIWGDDVESFRPERFENPSAIPQHAFKPFGNGQRACIGQQFALHEATLVLGMMLKHFDFEDHTNYELVIKERLTLKPEGFVVKAKSKGIPLGLIPSPSTEQSAKKVRKKAENAHNTPLLVLYGSNAGTAEGTARDLADIAMSKGFAPQVATLDSHAGNLPREGAVLIVTASYNGHPPDNAKQFVDWLDQASADEVKGVRYSVFGCGDKNWAATYQKVPAFIDETLAAKGAENIADMGEGDASDDFEGTYEEWSDHMWSDVAAYFNLDIENSEDNKSTLSLQFVDSAADMPLAKMHGAFSTNVVASKELQQPGSARSTRHLEIELPKEASYQEGDHLGVIPRNYEGIVNRVTARFGLSASQLIRLEAEEEKLAHLPLAKTVSVEELLQYVELQDPVTRTQLRAMAAKTVCPPHKVELEALLEKQAYKEQVLAKRLTMLELLEKYPACEMKFSEFIALLPSIRPRYYSISSSPRVDEKQASITVSVVSGPAWSGYGEYKGIASNYLAELQEGDTITCFISTDQSEFTLPKDPETPLIMVGPGTGVAPFRGFVQARKQLKEQGQSLGEAHLYFGCRSPHEDYLYQEELENAQSEGIITLHTAFSRMPNQPKTYVQHVMEQDGKKLIELLDQGAHFYICGDGSQMAPAVEATLMKSYADVHQVSYADARLWLQQLEEKGRYAKDVWAG

SEQ ID NO: 523 - DNA, 3147 bp, synthetic construct
  misc_feature 1..3147: note = Variant of cytochrome P450
  source 1..3147: mol_type = other DNA
atgacaattaaggaaatgcctcagcctaagacgtttggagaacttaaaaatttaccgttattaaacacagataaaccggttcaagctttgatgcgtattgcggatgaattaggagaaatctttaaattcgaggcgcctggtagcgtaacgcgctttttatcaagtcagcgtctaattaaagaagcatgcgatgaacgtcgctttgataaaaacttaagtcaatcgctgaaatttgcccgtgattttctgggagacgggttatttacaagctggacgcatgaaccgaattggaaaaaagcgcataatatcttaggcccaagctttagtcagcgtgcaatgaaacgttatcatgcgatgatggtcgatatcgccgtgcagcttgttcaaaagtgggagcgtctaaatgcagatgagcatattgaagtatcggaagacatgacacgtttaacgctggatacaattggtctttgcggcttcaactatcgctttaacagcttttaccgagatcagcctcatccatttattgtgtcggtagtgcgtgcgctggatgaaatcatgaacaagctgcagcgagcaaatccagacgacccagcttatgatgaaaacaagcgccagtgtcaagaagatatcaaggtgatgaacgactatgtcgataaaattattgcagatcgcaaagcaaggggtgaacaaagccatgatttattaacgcagatgctaaacggaaaagatccagaaacgggtgagccgcttgatgacgggaacattcgttatcaaattattacattcttaatcgcgggacacgaaacaacaagtggtcttttatcatttgcgctgtatttcttagtgaaaaatccacatgtattacaaaaagtagcagaagaagcagcacgagttctagtagatcctgttccaagctacaaacaagtcaaacagcttaaatatgtcggcatggtcttaaacgaagcgctgcgcttatggccaactggtcctgcgttttccctatatgcaaaagaagatacggtgcttggaggagaatatcctttaaccaaaggcgacgaagtaatggttctgattcctcagcttcaccgtgataaaacaatttggggagacgatgtggaggaattccgtccagagcgttttgaaaatccaagtgcgattccgcagcatgcgtttaaaccgtttggaaacggtcagcgtgcgtgtatcggtcagcagttcgctcttcatgaagcaacgctggtacttggtatgatgctaaaacactttgactttgaagatcatacaaactacgagctcgttattaaggaacgcttaacgttaaaacctgaaggctttgtggtaaaagcaaaatcgaaaggcattccgcttggcctgattccttcacctagcactgaacagtctgctaaaaaagtacgcaaaaaggcagaaaacgctcataatacgccgctgcttgtgctatacggttcaaatgcgggaacagctgaaggaacggcgcgtgatttagcagatattgcaatgagcaaaggatttgcaccgcaggtcgcaacgcttgattcacacgccggaaatcttccgcgcgaaggagctgtattaattgtaacggcgtcttataacggtcatccgcctgataacgcaaagcaatttgtcgactggttagaccaagcgtctgctgatgaagtaaaaggcgttcgctactccgtatttggatgcggcgataaaaactgggctgcgacgtatcaaaaagtgcctgcttttatcgatgaaacgcttgccgctaaaggggcagaaaacatcgctgaccgcggtttcgctgatgcaagcgacgactttgaaggcacgtatgaagaatggagtgatcatatgtggagtgacgtagcagcctactttaacctcgacattgaaaacagtgaagataataaatctactcttagccttcaatttgtcgacagcgccgcggatatgccgcttgcgaaaatgcacggtgcgttttcaacgaacgtcgtagcaagcaaagaacttcaacagccaggcagtgcacgaagcacgcgacatcttgaaattgaacttccaaaagaagcttcttatcaagaaggagatcatttaggtgttattcctcgcaactatgaaggaatagtaaaccgtgtaacagcaaggttcggcctaagcgcatcacagcaaatccgtctggaagcagaagaagaaaaattagctcatttgccactcgctaaaacagtatccgtagaagagcttctgcaatacgtggagcttcaagatcctgttacgcgcacgcagcttcgcgcaatggctgctaaaacggtctgcccgccgcataaagtagagcttgaagccttgcttgaaaagcaagcctacaaagaacaagtgctggcaaaacgtttaacaatgcttgaactgcttgaaaaatacccggcgtgtgaaatgaaattcagcgaatttatcgcccttctgccaagcatacgcccgcgctattactcgatttcttcatcacctcgtgtcgatgaaaaacaagcaagcatcacggtcagcgttgtctcaggaccggcgtggagcggatatggagaatataaaggaattgcgtcgaactatcttgccgagctgcaagaaggagatacgattacgtgctttatttccacagatcagtcagaatttacgctgccaaaagaccctctggtgccgcttatcatggtcggaccgggaacaggcgtcgcgccgtttagaggctttgtgcaggcgcgcaaacagctaaaagaacaaggacagtcacttggagaagcacatttatacttcggctgccgttcacctcatgaagactatctgtatcaagaagagcttgaaaacgcccaaagcgaaggcatcattacgcttcataccgctttttctcgcatgccaaatcagccgaaaacatacgttcagcacgtaatggaacaagacggcaagaaattgattgaacttcttgatcaaggagcgcacttctatatttgcggagacggaagccaaatggcacctgccgttgaagcaacgcttatgaaaagctatgctgacgttcaccaagtgagtgaagcagacgctcgcttatggctgcagcagctagaagaaaaaggccgatacgcaaaagacgtgtgggctggg

SEQ ID NO: 524 - protein, 1049 aa, synthetic construct
  REGION 1..1049: note = Variant of cytochrome P450
MTIKEMPQPKTFGELKNLPLLNTDKPVQALMRIADELGEIFKFEAPGSVTRFLSSQRLIKEACDERRFDKNLSQSLKFARDFLGDGLFTSWTHEPNWKKAHNILGPSFSQRAMKRYHAMMVDIAVQLVQKWERLNADEHIEVSEDMTRLTLDTIGLCGFNYRFNSFYRDQPHPFIVSVVRALDEIMNKLQRANPDDPAYDENKRQCQEDIKVMNDYVDKIIADRKARGEQSHDLLTQMLNGKDPETGEPLDDGNIRYQIITFLIAGHETTSGLLSFALYFLVKNPHVLQKVAEEAARVLVDPVPSYKQVKQLKYVGMVLNEALRLWPTGPAFSLYAKEDTVLGGEYPLTKGDEVMVLIPQLHRDKTIWGDDVEEFRPERFENPSAIPQHAFKPFGNGQRACIGQQFALHEATLVLGMMLKHFDFEDHTNYELVIKERLTLKPEGFVVKAKSKGIPLGLIPSPSTEQSAKKVRKKAENAHNTPLLVLYGSNAGTAEGTARDLADIAMSKGFAPQVATLDSHAGNLPREGAVLIVTASYNGHPPDNAKQFVDWLDQASADEVKGVRYSVFGCGDKNWAATYQKVPAFIDETLAAKGAENIADRGFADASDDFEGTYEEWSDHMWSDVAAYFNLDIENSEDNKSTLSLQFVDSAADMPLAKMHGAFSTNVVASKELQQPGSARSTRHLEIELPKEASYQEGDHLGVIPRNYEGIVNRVTARFGLSASQQIRLEAEEEKLAHLPLAKTVSVEELLQYVELQDPVTRTQLRAMAAKTVCPPHKVELEALLEKQAYKEQVLAKRLTMLELLEKYPACEMKFSEFIALLPSIRPRYYSISSSPRVDEKQASITVSVVSGPAWSGYGEYKGIASNYLAELQEGDTITCFISTDQSEFTLPKDPLVPLIMVGPGTGVAPFRGFVQARKQLKEQGQSLGEAHLYFGCRSPHEDYLYQEELENAQSEGIITLHTAFSRMPNQPKTYVQHVMEQDGKKLIELLDQGAHFYICGDGSQMAPAVEATLMKSYADVHQVSEADARLWLQQLEEKGRYAKDVWAG

SEQ ID NO: 525 - DNA, 3147 bp, synthetic construct
  misc_feature 1..3147: note = Variant of cytochrome P450
  source 1..3147: mol_type = other DNA
atgacaattaaggaaatgcctcagcctaagacgtttggagaacttaaaaatttaccgttattaaacacagataaaccggttcaagctttgatgcgtattgcggatgaattaggagaaatctttaaattcgaggcgcctggtagcgtaacgcgctttttatcaagtcagcgtctaattaaagaagcatgcgatgaaagtcgctttgataaaaacttaagtcaatcgctgaaatttgcccgtgattttctgggagacgggttatttacaagctggacgcatgaaccgaattggaaaaaagcgcataatatcttaggcccaagctttagtcagcatgcaatgcgccgttatcatgcgatgatggtcgatatcgccgtgcagcttgttcaaaagtgggagcgtctaaatgcagatgagcatattgaagtatcggaagacatgacacgtttaacgctggatacaattggtctttgcggcttcaactatcgctttaacagcttttaccgagatcagcctcatccatttattgtgtcggtagtgcgtctgctggatgaaatcatgaacaagctgcagcgagcaaatccagacgacccagcttatgatgaaaacaagcgccagtgtcaagaagatatcaaggtgatgaacgactatgtcgataaaattattgcagatcgcaaagcaaggggtgaacaaagccatgatttattaacgcagatgctaaacggaaaagatccagaaacgggtgagccgcttgatgacgggaacattcgttatcaaattattacattcttaatcgcgggacacgaaacaacaagtggtcttttatcatttgcgctgtatttcttagtgaaaaatccacatgtattacaaaaagtagcagaagaagcagcacgagttctagtagatcctgttccaagctacaaacaagtcaaacagcttaaatatgtcggcatggtcttaaacgaagcgctgcgcttatggccaactggtcctgcgttttccctatatgcaaaagaagatacggtgcttggaggagaatatcctttaaccaaaggcgacgaagtaatggttctgattcctcagcttcaccgtgataaaacaatttggggagacgatgtggaggaattccgtccagagcgttttgaaaatccaagtgcgattccgcagcatgcgtttaaaccgtttggaaacggtcagcgtgcgtgtatcggtcagcagttcgctcttcatgaagcaacgctggtacttggtatgatgctaaaacactttgactttgaagatcatacaaactacgagctcgttattaaggaacgcttaacgttaaaacctgaaggctttgtggtaaaagcaaaatcgaaaggcattccgcttggcctgattccttcacctagcactgaacagtctgctaaaaaagtacgcaaaaaggcagaaaacgctcataatacgccgctgcttgtgctatacggttcaaatgcgggaacagctgaaggaacggcgcgtgatttagcagatattgcaatgagcaaaggatttgcaccgcaggtcgcaacgcttgattcacacgccggaaatcttccgcgcgaaggagctgtattaattgtaacggcgtcttataacggtcatccgcctgataacgcaaagcaatttgtcgactggttagaccaagcgtctgctgatgaagtaaaaggcgttcgctactccgtatttggatgcggcgataaaaactgggctgcgacgtatcaaaaagtgcctgcttttatcgatgaaacgcttgccgctaaaggggcagaaaacatcgctgacatgggtgagggtgatgcaagcgacgactttgaaggcacttatgaagaatggagtgatcatatgtggagtgacgtagcagcctactttaacctcgacattgaaaacagtgaagataataaatctactcttagccttcaatttgtcgacagcgccgcggatatgccgcttgcgaaaatgcacggtgcgttttcaacgaacgtcgtagcaagcaaagaacttcaacagccaggcagtgcacgaagcacgcgacatcttgaaattgaacttccaaaagaagcttcttatcaagaaggagatcatttaggtgttattcctcgcaactatgaaggaatagtaaaccgtgtaacagcaaggttcggcctaagcgcatcacagcagatccgtctggaagcagaagaagaaaaattagctcatttgccactcgctaaaacagtatccgtagaagagcttctgcaatacgtggagcttcaagatcctgttacgcgcacgcagcttcgcgcaatggctgctaaaacggtctgcccgccgcataaagtagagcttgaagccttgcttgaaaagcaagcctacaaagaacaagtgctggcaaaacgtttaacaatgcttgaactgcttgaaaaatacccggcgtgtgaaatgaaattcagcgaatttatcgcccttctgccaagcatacgcccgcgctattactcgatttcttcatcacctcgtgtcgatgaaaaacaagcaagcatcacggtcagcgttgtctcaggagacgcgtggagcggatatggagaatataaaggaattgcgtcgaactatcttgccgagctgcaagaaggagatacgattacgtgctttatttccacagatcagtcagaatttacgctgccaaaagaccctgaaacgccgcttatcatggtcggaccgggaacaggcgtcgcgccgtttagaggctttgtgcaggcgcgcaaacagctaaaagaacaaggacagtcacttggagaagcacatttatacttcggctgccgttcacctcatgaagactatctgtatcaagaagagcttgaaaacgcccaaagcgaaggcatcattacgcttcataccgctttttctcgcatgccaaatcagccgaaaacatacgttcagcacgtaatggaacaagacggcaagaaattgattgaacttcttgatcaaggagcgcacttctatatctgcggagacggaagccaaatggcacctgccgttgaagcaacgcttatgaaaagctatgctgacgttcaccaagtgagtgaggcagacgctcgcttatggctgcagcagctagaagaaaaaggccgatacgcaaaagacgtgtgggctggg

SEQ ID NO: 526 - protein, 1049 aa, synthetic construct
  REGION 1..1049: note = Variant of cytochrome P450
MTIKEMPQPKTFGELKNLPLLNTDKPVQALMRIADELGEIFKFEAPGSVTRFLSSQRLIKEACDESRFDKNLSQSLKFARDFLGDGLFTSWTHEPNWKKAHNILGPSFSQHAMRRYHAMMVDIAVQLVQKWERLNADEHIEVSEDMTRLTLDTIGLCGFNYRFNSFYRDQPHPFIVSVVRLLDEIMNKLQRANPDDPAYDENKRQCQEDIKVMNDYVDKIIADRKARGEQSHDLLTQMLNGKDPETGEPLDDGNIRYQIITFLIAGHETTSGLLSFALYFLVKNPHVLQKVAEEAARVLVDPVPSYKQVKQLKYVGMVLNEALRLWPTGPAFSLYAKEDTVLGGEYPLTKGDEVMVLIPQLHRDKTIWGDDVEEFRPERFENPSAIPQHAFKPFGNGQRACIGQQFALHEATLVLGMMLKHFDFEDHTNYELVIKERLTLKPEGFVVKAKSKGIPLGLIPSPSTEQSAKKVRKKAENAHNTPLLVLYGSNAGTAEGTARDLADIAMSKGFAPQVATLDSHAGNLPREGAVLIVTASYNGHPPDNAKQFVDWLDQASADEVKGVRYSVFGCGDKNWAATYQKVPAFIDETLAAKGAENIADMGEGDASDDFEGTYEEWSDHMWSDVAAYFNLDIENSEDNKSTLSLQFVDSAADMPLAKMHGAFSTNVVASKELQQPGSARSTRHLEIELPKEASYQEGDHLGVIPRNYEGIVNRVTARFGLSASQQIRLEAEEEKLAHLPLAKTVSVEELLQYVELQDPVTRTQLRAMAAKTVCPPHKVELEALLEKQAYKEQVLAKRLTMLELLEKYPACEMKFSEFIALLPSIRPRYYSISSSPRVDEKQASITVSVVSGDAWSGYGEYKGIASNYLAELQEGDTITCFISTDQSEFTLPKDPETPLIMVGPGTGVAPFRGFVQARKQLKEQGQSLGEAHLYFGCRSPHEDYLYQEELENAQSEGIITLHTAFSRMPNQPKTYVQHVMEQDGKKLIELLDQGAHFYICGDGSQMAPAVEATLMKSYADVHQVSEADARLWLQQLEEKGRYAKDVWAG

SEQ ID NO: 527 - DNA, 3147 bp, synthetic construct
  misc_feature 1..3147: note = Variant of cytochrome P450
  source 1..3147: mol_type = other DNA
atgacaattaaggaaatgcctcagcctaagacgtttggagaacttaaaaatttaccgttattaaacacagataaaccggttcaagctttgatgcgtattgcggatgaattaggagaaatctttaaattcgaggcgcctggtagcgtaacgcgctttttatcaagtcagcgtctaattaaagaagcatgcgatgaacgtcgctttgataaaaacttaagtcaatcgctgaaatttgcccgtgattttctgggagacgggttatttacaagctggacgcatgaaccgaattggaaaaaagcgcataatatcttaggcccaagctttagtcagcatgcaatgggccgttatcatgcgatgatggtcgatatcgccgtgcagcttgttcaaaagtgggagcgtctaaatgcagatgagcatattgaagtatcggaagacatgacacgtttaacgctggatacaattggtctttgcggcttcaactatcgctttaacagcttttaccgagatcagcctcatccatttattgtgtcggtagtgcgtctgctggatgaaatcatgaacaagctgcagcgagcaaatccagacgacccagcttatgatgaaaacaagcgccagtgccaagaagatatcaaggtgatgaacgactatgtcgataaaattattgcagatcgcaaagcaaggggtgaacaaagccatgatttattaacgcagatgctaaacggaaaagatccagaaacgggtgagccgcttgatgacgggaacattcgttatcaaattattacattcttaatcgcgggacacgaaacaacaagtggtcttttatcatttgcgctgtatttcttagtgaaaaatccacatgtattacaaaaagtagcagaagaagcagcacgagttctagtagatcctgttccaagctacaaacaagtcaaacagcttaaatatgtcggcatggtcttaaacgaagcgctgcgcttatggccaactggtcctgcgttttccctatatgcaaaagaagatacggtgcttggaggagaatatcctttaaccaaaggcgacgaagtaatggttctgattcctcagcttcaccgtgataaaacaatttggggagacgatgtggaggaattccgtccagagcgttttgaaaatccaagtgcgattccgcagcatgcgtttaaaccgtttggaaacggtcagcgtgcgtgtatcggtcagcagttcgctcttcatgaagcaacgctggtacttggtatgatgctaaaacactttgactttgaagatcatacaaactacgagctcgttattaaggaacgcttaacgttaaaacctgaaggctttgtggtaaaagcaaaatcgaaaggcattccgcttggcctgattccttcacctagcactgaacagtctgctaaaaaagtacgcaaaaaggcagaaaacgctcataatacgccgctgcttgtgctatacggttcaaatgcgggaacagctgaaggaacggcgcgtgatttagcagatattgcaatgagcaaaggatttgcaccgcaggtcgcaacgcttgattcacacgccggaaatcttccgcgcgaaggagctgtattaattgtaacggcgtcttataacggtcatccgcctgataacgcaaagcaatttgtcgactggttagaccaagcgtctgctgatgaagtaaaaggcgttcgctactccgtatttggatgcggcgataaaaactgggctgcgacgtatcaaaaagtgcctgcttttatcgatgaaacgcttgccgctaaaggggcagaaaacatcgctgacatgggtttcggtgatgcaagcgacgactttgaaggcacttatgaagaatggagtgatcatatgtggagtgacgtagcagcctactttaacctcgacattgaaaacagtgaagataataaatctactctttcacttcaatttgtcgacagcgccgcggatatgccgcttgcgaaaatgcacggtgcgttttcaacgaacgtcgtagcaagcaaagaacttcaacagccaggcagtgcacgaagcacgcgacatcttgaaattgaacttccaaaagaagcttcttatcaagaaggagatcatttaggtgttattcctcgcaactatgaaggaatagtaaaccgtgtaacagcaaggttcggcctaagcgcatcacagcagatccgtctggaagcagaagaagaaaaattagctcatttgccactcgctaaaacagtatccgtagaagagcttctgcaatacgtggagcttcaagatcctgttacgcgcacgcagcttcgcgcaatggctgctaaaacggtctgcccgccgcataaagtagagcttgaagccttgcttgaaaagcaagcctacaaagaacaagtgctggcaaaacgtttaacaatgcttgaactgcttgaaaaatacccggcgtgtgaaatgaaattcagcgaatttatcgcccttctgccaagcatacgcccgcgctattactcgatttcttcatcacctcgtgtcgatgaaaaacaagcaagcatcacggtcagcgttgtctcaggaccagcgtggagcggatatggagaatataaaggaattgcgtcgaactatcttgccgagctgcaagaaggagatacgattacgtgctttatttccacagatcagtcagaatttacgctgccaaaagaccctctgactccgcttatcatggtcggaccgggaacaggcgtcgcgccgtttagaggctttgtgcaggcgcgcaaacagctaaaagaacaaggacagtcacttggagaagcacatttatacttcggctgccgttcacctcatgaagactatctgtatcaagaagagcttgaaaacgcccaaagcgaaggcatcattacgcttcataccgctttttctcgcatgccaaatcagccgaaaacatacgttcagcacgtaatggaacaagacggcaagaaattgattgaacttcttgatcaaggagcgcacttctatatttgcggagacggaagccaaatggcacctgccgttgaagcaacgcttatgaaaagctatgctgacgttcaccaagtgagtgaggcagacgctcgcttatggctgcagcagctagaagaaaaaggccgatacgcaaaagacgtgtgggctggg

SEQ ID NO: 528 - protein, 1049 aa, synthetic construct
  REGION 1..1049: note = Variant of cytochrome P450
MTIKEMPQPKTFGELKNLPLLNTDKPVQALMRIADELGEIFKFEAPGSVTRFLSSQRLIKEACDERRFDKNLSQSLKFARDFLGDGLFTSWTHEPNWKKAHNILGPSFSQHAMGRYHAMMVDIAVQLVQKWERLNADEHIEVSEDMTRLTLDTIGLCGFNYRFNSFYRDQPHPFIVSVVRLLDEIMNKLQRANPDDPAYDENKRQCQEDIKVMNDYVDKIIADRKARGEQSHDLLTQMLNGKDPETGEPLDDGNIRYQIITFLIAGHETTSGLLSFALYFLVKNPHVLQKVAEEAARVLVDPVPSYKQVKQLKYVGMVLNEALRLWPTGPAFSLYAKEDTVLGGEYPLTKGDEVMVLIPQLHRDKTIWGDDVEEFRPERFENPSAIPQHAFKPFGNGQRACIGQQFALHEATLVLGMMLKHFDFEDHTNYELVIKERLTLKPEGFVVKAKSKGIPLGLIPSPSTEQSAKKVRKKAENAHNTPLLVLYGSNAGTAEGTARDLADIAMSKGFAPQVATLDSHAGNLPREGAVLIVTASYNGHPPDNAKQFVDWLDQASADEVKGVRYSVFGCGDKNWAATYQKVPAFIDETLAAKGAENIADMGFGDASDDFEGTYEEWSDHMWSDVAAYFNLDIENSEDNKSTLSLQFVDSAADMPLAKMHGAFSTNVVASKELQQPGSARSTRHLEIELPKEASYQEGDHLGVIPRNYEGIVNRVTARFGLSASQQIRLEAEEEKLAHLPLAKTVSVEELLQYVELQDPVTRTQLRAMAAKTVCPPHKVELEALLEKQAYKEQVLAKRLTMLELLEKYPACEMKFSEFIALLPSIRPRYYSISSSPRVDEKQASITVSVVSGPAWSGYGEYKGIASNYLAELQEGDTITCFISTDQSEFTLPKDPLTPLIMVGPGTGVAPFRGFVQARKQLKEQGQSLGEAHLYFGCRSPHEDYLYQEELENAQSEGIITLHTAFSRMPNQPKTYVQHVMEQDGKKLIELLDQGAHFYICGDGSQMAPAVEATLMKSYADVHQVSEADARLWLQQLEEKGRYAKDVWAG

SEQ ID NO: 529 - DNA, 3147 bp, synthetic construct
  misc_feature 1..3147: note = Variant of cytochrome P450
  source 1..3147: mol_type = other DNA
atgacaattaaggaaatgcctcagcctaagacgtttggagaacttaaaaatttaccgttattaaacacagataaaccggttcaagctttgatgcgtattgcggatgaattaggagaaatctttaaattcgaggcgcctggtagcgtaacgcgctttttatcaagtcagcgtctaattaaagaagcatgcgatgaaagtcgctttgataaaaacttaagtcaatcgctgaaatttgcccgtgattttctgggagacgggttatttacaagctggacgcatgaaccgaattggaaaaaagcgcataatatcttaggcccaagctttagtcagcgtgcaatgaaacgttatcatgcgatgatggtcgatatcgccgtgcagcttgttcaaaagtgggagcgtctaaatgcagatgagcatattgaagtatcggaagacatgacacgtttaacgctggatacaattggtctttgcggcttcaactatcgctttaacagcttttaccgagatcagcctcatccatttattgtggcggtagtgcgtctgctggatgaagtcatgaacaagctgcagcgagcaaatccagacgacccagcttatgatgaaaacaagcgccagtgtcaagaagatatcaaggtgatgaacgactatgtcgataaaattattgcagatcgcaaagcaaggggtgaacaaagccatgatttattaacgcagatgctaaacggaaaagatccagaaacgggtgagccgcttgatgacgggaacattcgttatcaaattattacattcttaatcgcgggacacgaaacaacaagtggtcttttatcatttgcgctgtatttcttagtgaaaaatccacatgtattacaaaaagtagcagaagaagcagcacgagttctagtagatcctgttccaagctacaaacaagtcaaacagcttaaatatgtcggcatggtcttaaacgaagcgctgcgcttatggccaactggtcctgcgttttccctatatgcaaaagaagatacggtgcttggaggagaatatcctttaaccaaaggcgacgaagtaatggttctgattcctcagcttcaccgtgataaaacaatttggggagacgatgtggaggagttccgtccagagcgttttgaaaatccaagtgcgattccgcagcatgcgtttaaaccgtttggaaacggtcagcgtgcgtgtatcggtcagcagttcgctcttcatgaagcaacgctggtacttggtatgatgctaaaacactttgactttgaagatcatacaaactacgagctcgttattaaggaacgcttaacgttaaaacctgaaggctttgtggtaaaagcaaaatcgaaaggcattccgcttggcctgattccttcacctagcactgaacagtctgctaaaaaagtacgcaaaaaggcagaaaacgctcataatacgccgctgcttgtgctatacggttcaaatgcgggaacagctgaaggaacggcgcgtgatttagcagatattgcaatgagcaaaggatttgcaccgcaggtcgcaacgcttgattcacacgccggaaatcttccgcgcgaaggagctgtattaattgtaacggcgtcttataacggtcatccgcctgataacgcaaagcaatttgtcgactggttagaccaagcgtctgctgatgaagtaaaaggcgttcgctactccgtatttggatgcggcgataaaaactgggctgcgacgtatcaaaaagtgcctgcttttatcgatgaaacgcttgccgctaaaggggcagaaaacatcgctgaccgcggtttcggtgatgcaagcgacgactttgaaggcacgtatgaagaatggagtgatcatatgtggagtgacgtagcagcctactttaacctcgacattgaaaacagtgaagataataaatctactctttcacttcaatttgtcgacagcgccgcggatatgccgcttgcgaaaatgcacggtgcgttttcaacgaacgtcgtagcaagcaaagaacttcaacagccaggcagtgcacgaagcacgcgacatcttgaaattgaacttccaaaagaagcttcttatcaagaaggagatcatttaggtgttattcctcgcaactatgaaggaatagtaaaccgtgtaacagcaaggttcggcctaagcgcatcacagcaaatccgtctggaagcagaagaagaaaaattagctcatttgccactcgctaaaacagtatccgtagaagagcttctgcaatacgtggagcttcaagatcctgttacgcgcacgcagcttcgcgcaatggctgctaaaacggtctgcccgccgcataaagtagagcttgaagccttgcttgaaaagcaagcctacaaagaacaagtgctggcaaaacgtttaacaatgcttgaactgcttgaaaaatacccggcgtgtgaaatgaaattcagcgaatttatcgcccttctgccaagcatacgcccgcgctattactcgatttcttcatcacctcgtgtcgatgaaaaacaagcaagcatcacggtcagcgttgtctcaggaccagcgtggagcggatatggagaatataaaggaattgcgtcgaactatcttgccgagctgcaagaaggagatacgattacgtgctttatttccacagatcagtcagaatttacgctgccaaaagaccctgaaactccgcttatcatggtcggaccgggaacaggcgtcgcgccgtttagaggctttgtgcaggcgcgcaaacagctaaaagaacaaggacagtcacttggagaagcacatttatacttcggctgccgttcacctcatgaagactatctgtatcaagaagagcttgaaaacgcccaaagcgaaggcatcattacgcttcataccgctttttctcgcatgccaaatcagccgaaaacatacgttcagcacgtaatggaacaagacggcaagaaattgattgaacttcttgatcaaggagcgcacttctatatctgcggagacggaagccaaatggcacctgccgttgaagcaacgcttatgaaaagctatgctgacgttcaccaagtgagtgaagcagacgctcgcttatggctgcagcagctagaagaaaaaggccgatacgcaaaagacgtgtgggctggg

SEQ ID NO: 530 - protein, 1049 aa, synthetic construct
  REGION 1..1049: note = Variant of cytochrome P450
MTIKEMPQPKTFGELKNLPLLNTDKPVQALMRIADELGEIFKFEAPGSVTRFLSSQRLIKEACDESRFDKNLSQSLKFARDFLGDGLFTSWTHEPNWKKAHNILGPSFSQRAMKRYHAMMVDIAVQLVQKWERLNADEHIEVSEDMTRLTLDTIGLCGFNYRFNSFYRDQPHPFIVAVVRLLDEVMNKLQRANPDDPAYDENKRQCQEDIKVMNDYVDKIIADRKARGEQSHDLLTQMLNGKDPETGEPLDDGNIRYQIITFLIAGHETTSGLLSFALYFLVKNPHVLQKVAEEAARVLVDPVPSYKQVKQLKYVGMVLNEALRLWPTGPAFSLYAKEDTVLGGEYPLTKGDEVMVLIPQLHRDKTIWGDDVEEFRPERFENPSAIPQHAFKPFGNGQRACIGQQFALHEATLVLGMMLKHFDFEDHTNYELVIKERLTLKPEGFVVKAKSKGIPLGLIPSPSTEQSAKKVRKKAENAHNTPLLVLYGSNAGTAEGTARDLADIAMSKGFAPQVATLDSHAGNLPREGAVLIVTASYNGHPPDNAKQFVDWLDQASADEVKGVRYSVFGCGDKNWAATYQKVPAFIDETLAAKGAENIADRGFGDASDDFEGTYEEWSDHMWSDVAAYFNLDIENSEDNKSTLSLQFVDSAADMPLAKMHGAFSTNVVASKELQQPGSARSTRHLEIELPKEASYQEGDHLGVIPRNYEGIVNRVTARFGLSASQQIRLEAEEEKLAHLPLAKTVSVEELLQYVELQDPVTRTQLRAMAAKTVCPPHKVELEALLEKQAYKEQVLAKRLTMLELLEKYPACEMKFSEFIALLPSIRPRYYSISSSPRVDEKQASITVSVVSGPAWSGYGEYKGIASNYLAELQEGDTITCFISTDQSEFTLPKDPETPLIMVGPGTGVAPFRGFVQARKQLKEQGQSLGEAHLYFGCRSPHEDYLYQEELENAQSEGIITLHTAFSRMPNQPKTYVQHVMEQDGKKLIELLDQGAHFYICGDGSQMAPAVEATLMKSYADVHQVSEADARLWLQQLEEKGRYAKDVWAG

SEQ ID NO: 531 - DNA, 3147 bp, synthetic construct
  misc_feature 1..3147: note = Variant of cytochrome P450
  source 1..3147: mol_type = other DNA
atgacaattaaggaaatgcctcagcctaagacgtttggagaacttaaaaatttaccgttattaaacacagataaaccggttcaagctttgatgcgtattgcggatgaattaggagaaatctttaaattcgaggcgcctggtagcgtaacgcgctttttatcaagtcagcgtctaattaaagaagcatgcgatgaacgtcgctttgataaaaacttaagtcaatcgctgaaatttgcccgtgattttctgggagacgggttatttacaagctggacgcatgaaccgaattggaaaaaagcgcataatatcttaggcccaagctttagtcagcatgcaatgcgccgttatcatgcgatgatggtcgatatcgccgtgcagcttgttcaaaagtgggagcgtctaaatgcagatgagcatattgaagtatcggaagacatgacacgtttaacgctggatacaattggtctttgcggcttcaactatcgctttaacagcttttaccgagatcagcctcatccatttattgtgtcggtagtgcgtctgctggatgaagtcatgaacaagctgcagcgagcaaatccagacgacccagcttatgatgaaaacaagcgccagtgccaagaagatatcaaggtgatgaacgactatgtcgataaaattattgcagatcgcaaagcaaggggtgaacaaagccatgatttattaacgcagatgctaaacggaaaagatccagaaacgggtgagccgcttgatgacgggaacattcgttatcaaattattacattcttaatcgcgggacacgaaacaacaagtggtcttttatcatttgcgctgtatttcttagtgaaaaatccacatgtattacaaaaagtagcagaagaagcagcacgagttctagtagatcctgttccaagctacaaacaagtcaaacagcttaaatatgtcggcatggtcttaaacgaagcgctgcgcttatggccaactggtcctgcgttttccctatatgcaaaagaagatacggtgcttggaggagaatatcctttaaccaaaggcgacgaagtaatggttctgattcctcagcttcaccgtgataaaacaatttggggagacgatgtggagtcgttccgtccagagcgttttgaaaatccaagtgcgattccgcagcatgcgtttaaaccgtttggaaacggtcagcgtgcgtgtatcggtcagcagttcgctcttcatgaagcaacgctggtacttggtatgatgctaaaacactttgactttgaagatcatacaaactacgagctcgttattaaggaacgcttaacgttaaaacctgaaggctttgtggtaaaagcaaaatcgaaaggcattccgcttggcctgattccttcacctagcactgaacagtctgctaaaaaagtacgcaaaaaggcagaaaacgctcataatacgccgctgcttgtgctatacggttcaaatgcgggaacagctgaaggaacggcgcgtgatttagcagatattgcaatgagcaaaggatttgcaccgcaggtcgcaacgcttgattcacacgccggaaatcttccgcgcgaaggagctgtattaattgtaacggcgtcttataacggtcatccgcctgataacgcaaagcaatttgtcgactggttagaccaagcgtctgctgatgaagtaaaaggcgttcgctactccgtatttggatgcggcgataaaaactgggctgcgacgtatcaaaaagtgcctgcttttatcgatgaaacgcttgccgctaaaggggcagaaaacatcgctgacatgggtgagggtgatgcaagcgacgactttgaaggcacttatgaagaatggagtgatcatatgtggaccgacgtagcagcctactttaacctcgacattgaaaacagtgaagataataaatctactctttcacttcaatttgtcgacagcgccgcggatatgccgcttgcgaaaatgcacggtgcgttttcaacgaacgtcgtagcaagcaaagaacttcaacagccaggcagtgcacgaagcacgcgacatcttgaaattgaacttccaaaagaagcttcttatcaagaaggagatcatttaggtgttattcctcgcaactatgaaggaatagtaaaccgtgtaacagcaaggttcggcctaagcgcatcacagcagatccgtctggaagcagaagaagaaaaattagctcatttgccactcgctaaaacagtatccgtagaagagcttctgcaatacgtggagcttcaagatcctgttacgcgcacgcagcttcgcgcaatggctgctaaaacggtctgcccgccgcataaagtagagcttgaagccttgcttgaaaagcaagcctacaaagaacaagtgctggcaaaacgtttaacaatgcttgaactgcttgaaaaatacccggcgtgtgaaatgaaattcagcgaatttatcgcccttctgccaagcatacgcccgcgctattactcgatttcttcatcacctcgtgtcgatgaaaaacaagcaagcatcacggtcagcgttgtctcaggagacgcgtggagcggatatggagaatataaaggaattgcgtcgaactatcttgccgagctgcaagaaggagatacgattacgtgctttatttccacagatcagtcagaatttacgctgccaaaagaccctgaaactccgcttatcatggtcggaccgggaacaggcgtcgcgccgtttagaggctttgtgcaggcgcgcaaacagctaaaagaacaaggacagtcacttggagaagcacatttatacttcggctgccgttcacctcatgaagactatctgtatcaagaagagcttgaaaacgcccaaagcgaaggcatcattacgcttcataccgctttttctcgcatgccaaatcagccgaaaacatacgttcagcacgtaatggaacaagacggcaagaaattgattgaacttcttgatcaaggagcgcacttctattgttgcggagacggaagccaaatggcacctgccgttgaagcaacgcttatgaaaagctatgctgacgttcaccaagtgagttatgcagacgctcgcttatggctgcagcagctagaagaaaaaggccgatacgcaaaagacgtgtgggctggg

SEQ ID NO: 532 - protein, 1049 aa, synthetic construct
  REGION 1..1049: note = Variant of cytochrome P450
MTIKEMPQPKTFGELKNLPLLNTDKPVQALMRIADELGEIFKFEAPGSVTRFLSSQRLIKEACDERRFDKNLSQSLKFARDFLGDGLFTSWTHEPNWKKAHNILGPSFSQHAMRRYHAMMVDIAVQLVQKWERLNADEHIEVSEDMTRLTLDTIGLCGFNYRFNSFYRDQPHPFIVSVVRLLDEVMNKLQRANPDDPAYDENKRQCQEDIKVMNDYVDKIIADRKARGEQSHDLLTQMLNGKDPETGEPLDDGNIRYQIITFLIAGHETTSGLLSFALYFLVKNPHVLQKVAEEAARVLVDPVPSYKQVKQLKYVGMVLNEALRLWPTGPAFSLYAKEDTVLGGEYPLTKGDEVMVLIPQLHRDKTIWGDDVESFRPERFENPSAIPQHAFKPFGNGQRACIGQQFALHEATLVLGMMLKHFDFEDHTNYELVIKERLTLKPEGFVVKAKSKGIPLGLIPSPSTEQSAKKVRKKAENAHNTPLLVLYGSNAGTAEGTARDLADIAMSKGFAPQVATLDSHAGNLPREGAVLIVTASYNGHPPDNAKQFVDWLDQASADEVKGVRYSVFGCGDKNWAATYQKVPAFIDETLAAKGAENIADMGEGDASDDFEGTYEEWSDHMWTDVAAYFNLDIENSEDNKSTLSLQFVDSAADMPLAKMHGAFSTNVVASKELQQPGSARSTRHLEIELPKEASYQEGDHLGVIPRNYEGIVNRVTARFGLSASQQIRLEAEEEKLAHLPLAKTVSVEELLQYVELQDPVTRTQLRAMAAKTVCPPHKVELEALLEKQAYKEQVLAKRLTMLELLEKYPACEMKFSEFIALLPSIRPRYYSISSSPRVDEKQASITVSVVSGDAWSGYGEYKGIASNYLAELQEGDTITCFISTDQSEFTLPKDPETPLIMVGPGTGVAPFRGFVQARKQLKEQGQSLGEAHLYFGCRSPHEDYLYQEELENAQSEGIITLHTAFSRMPNQPKTYVQHVMEQDGKKLIELLDQGAHFYCCGDGSQMAPAVEATLMKSYADVHQVSYADARLWLQQLEEKGRYAKDVWAG

SEQ ID NO: 533 - DNA, 3147 bp, synthetic construct
  misc_feature 1..3147: note = Variant of cytochrome P450
  source 1..3147: mol_type = other DNA
atgacaattaaggaaatgcctcagcctaagacgtttggagaacttaaaaatttaccgttattaaacacagataaaccggttcaagctttgatgcgtattgcggatgaattaggagaaatctttaaattcgaggcgcctggtagcgtaacgcgctttttatcaagtcagcgtctaattaaagaagcatgcgatgaacgtcgctttgataaaaacttaagtcaatcgctgaaatttgcccgtgattttctgggagacgggttatttacaagctggacgcatgaaccgaattggaaaaaagcgcataatatcttaggcccaagctttagtcagcatgcaatgcgccgttatcatgcgatgatggtcgatatcgccgtgcagcttgttcaaaagtgggagcgtctaaatgcagatgagcatattgaagtatcggaagacatgacacgtttaacgctggatacaattggtctttgcggcttcaactatcgctttaacagcttttaccgagatcagcctcatccatttattgtgtcggtagtgcgtctgctggatgaagtcatgaacaagctgcagcgagcaaatccagacgacccagcttatgatgaaaacaagcgccagtgccaagaagatatcaaggtgatgaacgactatgtcgataaaattattgcagatcgcaaagcaaggggtgaacaaagccatgatttattaacgcagatgctaaacggaaaagatccagaaacgggtgagccgcttgatgacgggaacattcgttatcaaattattacattcttaatcgcgggacacgaaacaacaagtggtcttttatcatttgcgctgtatttcttagtgaaaaatccacatgtattacaaaaagtagcagaagaagcagcacgagttctagtagatcctgttccaagctacaaacaagtcaaacagcttaaatatgtcggcatggtcttaaacgaagcgctgcgcttatggccaactggtcctgcgttttccctatatgcaaaagaagatacggtgcttggaggagaatatcctttaaccaaaggcgacgaagtaatggttctgattcctcagcttcaccgtgataaaacaatttggggagacgatgtggagtcgttccgtccagagcgttttgaaaatccaagtgcgattccgcagcatgcgtttaaaccgtttggaaacggtcagcgtgcgtgtatcggtcagcagttcgctcttcatgaagcaacgctggtacttggtatgatgctaaaacactttgactttgaagatcatacaaactacgagctcgttattaaggaacgcttaacgttaaaacctgaaggctttgtggtaaaagcaaaatcgaaaggcattccgcttggcctgattccttcacctagcactgaacagtctgctaaaaaagtacgcaaaaaggcagaaaacgctcataatacgccgctgcttgtgctatacggttcaaatgcgggaacagctgaaggaacggcgcgtgatttagcagatattgcaatgagcaaaggatttgcaccgcaggtcgcaacgcttgattcacacgccggaaatcttccgcgcgaaggagctgtattaattgtaacggcgtcttataacggtcatccgcctgataacgcaaagcaatttgtcgactggttagaccaagcgtctgctgatgaagtaaaaggcgttcgctactccgtatttggatgcggcgataaaaactgggctgcgacgtatcaaaaagtgcctgcttttatcgatgaaacgcttgccgctaaaggggcagaaaacatcgctgacatgggtttcggtgatgcaagcgacgactttgaaggcacttatgaagaatggagtgatcatatgtggagtgacgtagcagcctactttaacctcgacattgaaaacagtgaagataataaatctactcttacccttcaatttgtcgacagcgccgcggatatgccgcttgcgaaaatgcacggtgcgttttcaacgaacgtcgtagcaagcaaagaacttcaacagccaggcagtgcacgaagcacgcgacatcttgaaattgaacttccaaaagaagcttcttatcaagaaggagatcatttaggtgttattcctcgcaactatgaaggaatagtaaaccgtgtaacagcaaggttcggcctaagcgcatcacagctgatccgtctggaagcagaagaagaaaaattagctcatttgccactcgctaaaacagtatccgtagaagagcttctgcaatacgtggagcttcaagatcctgttacgcgcacgcagcttcgcgcaatggctgctaaaacggtctgcccgccgcataaagtagagcttgaagccttgcttgaaaagcaagcctacaaagaacaagtgctggcaaaacgtttaacaatgcttgaactgcttgaaaaatacccggcgtgtgaaatgaaattcagcgaatttatcgcccttctgccaagcatacgcccgcgctattactcgatttcttcatcacctcgtgtcgatgaaaaacaagcaagcatcacggtcagcgttgtctcaggaccagcgtggagcggatatggagaatataaaggaattgcgtcgaactatcttgccgagctgcaagaaggagatacgattacgtgctttatttccacagatcagtcagaatttacgctgccaaaagaccctctgactccgcttatcatggtcggaccgggaacaggcgtcgcgccgtttagaggctttgtgcaggcgcgcaaacagctaaaagaacaaggacagtcacttggagaagcacatttatacttcggctgccgttcacctcatgaagactatctgtatcaagaagagcttgaaaacgcccaaagcgaaggcatcattacgcttcataccgctttttctcgcatgccaaatcagccgaaaacatacgttcagcacgtaatggaacaagacggcaagaaattgattgaacttcttgatcaaggagcgcacttctatatttgcggagacggaagccaaatggcacctgccgttgaagcaacgcttatgaaaagctatgctgacgttcaccaagtgagtgaggcagacgctcgcttatggctgcagcagctagaagaaaaaggccgatacgcaaaagacgtgtgggctggg

SEQ ID NO: 534 - protein, 1049 aa, synthetic construct
  REGION 1..1049: note = Variant of cytochrome P450
MTIKEMPQPKTFGELKNLPLLNTDKPVQALMRIADELGEIFKFEAPGSVTRFLSSQRLIKEACDERRFDKNLSQSLKFARDFLGDGLFTSWTHEPNWKKAHNILGPSFSQHAMRRYHAMMVDIAVQLVQKWERLNADEHIEVSEDMTRLTLDTIGLCGFNYRFNSFYRDQPHPFIVSVVRLLDEVMNKLQRANPDDPAYDENKRQCQEDIKVMNDYVDKIIADRKARGEQSHDLLTQMLNGKDPETGEPLDDGNIRYQIITFLIAGHETTSGLLSFALYFLVKNPHVLQKVAEEAARVLVDPVPSYKQVKQLKYVGMVLNEALRLWPTGPAFSLYAKEDTVLGGEYPLTKGDEVMVLIPQLHRDKTIWGDDVESFRPERFENPSAIPQHAFKPFGNGQRACIGQQFALHEATLVLGMMLKHFDFEDHTNYELVIKERLTLKPEGFVVKAKSKGIPLGLIPSPSTEQSAKKVRKKAENAHNTPLLVLYGSNAGTAEGTARDLADIAMSKGFAPQVATLDSHAGNLPREGAVLIVTASYNGHPPDNAKQFVDWLDQASADEVKGVRYSVFGCGDKNWAATYQKVPAFIDETLAAKGAENIADMGFGDASDDFEGTYEEWSDHMWSDVAAYFNLDIENSEDNKSTLTLQFVDSAADMPLAKMHGAFSTNVVASKELQQPGSARSTRHLEIELPKEASYQEGDHLGVIPRNYEGIVNRVTARFGLSASQLIRLEAEEEKLAHLPLAKTVSVEELLQYVELQDPVTRTQLRAMAAKTVCPPHKVELEALLEKQAYKEQVLAKRLTMLELLEKYPACEMKFSEFIALLPSIRPRYYSISSSPRVDEKQASITVSVVSGPAWSGYGEYKGIASNYLAELQEGDTITCFISTDQSEFTLPKDPLTPLIMVGPGTGVAPFRGFVQARKQLKEQGQSLGEAHLYFGCRSPHEDYLYQEELENAQSEGIITLHTAFSRMPNQPKTYVQHVMEQDGKKLIELLDQGAHFYICGDGSQMAPAVEATLMKSYADVHQVSEADARLWLQQLEEKGRYAKDVWAG

SEQ ID NO: 535 - DNA, 3147 bp, synthetic construct
  misc_feature 1..3147: note = Variant of cytochrome P450
  source 1..3147: mol_type = other DNA
atgacaattaaggaaatgcctcagcctaagacgtttggagaacttaaaaatttaccgttattaaacacagataaaccggttcaagctttgatgcgtattgcggatgaattaggagaaatctttaaattcgaggcgcctggtagcgtaacgcgctttttatcaagtcagcgtctaattaaagaagcatgcgatgaacgtcgctttgataaaaacttaagtcaatcgctgaaatttgcccgtgattttctgggagacgggttatttacaagctggacgcatgaaccgaattggaaaaaagcgcataatatcttaggcccaagctttagtcagcgtgcaatgaaacgttatcatgcgatgatggtcgatatcgccgtgcagcttgttcaaaagtgggagcgtctaaatgcagatgagcatattgaagtatcggaagacatgacacgtttaacgctggatacaattggtctttgcggcttcaactatcgctttaacagcttttaccgagatcagcctcatccatttattgtgtcggtagtgcgtgcgctggatgaagtcatgaacaagctgcagcgagcaaatccagacgacccagcttatgatgaaaacaagcgccagtgccaagaagatatcaaggtgatgaacgactatgtcgataaaattattgcagatcgcaaagcaaggggtgaacaaagccatgatttattaacgcagatgctaaacggaaaagatccagaaacgggtgagccgcttgatgacgggaacattcgttatcaaattattacattcttaatcgcgggacacgaaacaacaagtggtcttttatcatttgcgctgtatttcttagtgaaaaatccacatgtattacaaaaagtagcagaagaagcagcacgagttctagtagatcctgttccaagctacaaacaagtcaaacagcttaaatatgtcggcatggtcttaaacgaagcgctgcgcttatggccaactggtcctgcgttttccctatatgcaaaagaagatacggtgcttggaggagaatatcctttaaccaaaggcgacgaagtaatggttctgattcctcagcttcaccgtgataaaacaatttggggagacgatgtggagtcgttccgtccagagcgttttgaaaatccaagtgcgattccgcagcatgcgtttaaaccgtttggaaacggtcagcgtgcgtgtatcggtcagcagttcgctcttcatgaagcaacgctggtacttggtatgatgctaaaacactttgactttgaagatcatacaaactacgagctcgttattaaggaacgcttaacgttaaaacctgaaggctttgtggtaaaagcaaaatcgaaaggcattccgcttggcctgattccttcacctagcactgaacagtctgctaaaaaagtacgcaaaaaggcagaaaacgctcataatacgccgctgcttgtgctatacggttcaaatgcgggaacagctgaaggaacggcgcgtgatttagcagatattgcaatgagcaaaggatttgcaccgcaggtcgcaacgcttgattcacacgccggaaatcttccgcgcgaaggagctgtattaattgtaacggcgtcttataacggtcatccgcctgataacgcaaagcaatttgtcgactggttagaccaagcgtctgctgatgaagtaaaaggcgttcgctactccgtatttggatgcggcgataaaaactgggctgcgacgtatcaaaaagtgcctgcttttatcgatgaaacgcttgccgctaaaggggcagaaaacatcgctgacatgggtttcggtgatgcaagcgacgactttgaaggcacttatgaagaatggagtgatcatatgtggagtgacgtagcagcctactttaacctcgacattgaaaacagtgaagataataaatctactcttagccttcaatttgtcgacagcgccgcggatatgccgcttgcgaaaatgcacggtgcgttttcaacgaacgtcgtagcaagcaaagaacttcaacagccaggcagtgcacgaagcacgcgacatcttgaaattgaacttccaaaagaagcttcttatcaagaaggagatcatttaggtgttattcctcgcaactatgaaggaatagtaaaccgtgtaacagcaaggttcggcctaagcgcatcacagcagatccgtctggaagcagaagaagaaaaattagctcatttgccactcgctaaaacagtatccgtagaagagcttctgcaatacgtggagcttcaagatcctgttacgcgcacgcagcttcgcgcaatggctgctaaaacggtctgcccgccgcataaagtagagcttgaagccttgcttgaaaagcaagcctacaaagaacaagtgctggcaaaacgtttaacaatgcttgaactgcttgaaaaatacccggcgtgtgaaatgaaattcagcgaatttatcgcccttctgccaagcatacgcccgcgctattactcgatttcttcatcacctcgtgtcgatgaaaaacaagcaagcatcacggtcagcgttgtctcaggagacgcgtggagcggatatggagaatataaaggaattgcgtcgaactatcttgccgagctgcaagaaggagatacgattacgtgctttatttccacagatcagtcagaatttacgctgccaaaagaccctgaagtgccgcttatcatggtcggaccgggaacaggcgtcgcgccgtttagaggctttgtgcaggcgcgcaaacagctaaaagaacaaggacagtcacttggagaagcacatttatacttcggctgccgttcacctcatgaagactatctgtatcaagaagagcttgaaaacgcccaaagcgaaggcatcattacgcttcataccgctttttctcgcatgccaaatcagccgaaaacatacgttcagcacgtaatggaacaagacggcaagaaattgattgaacttcttgatcaaggagcgcacttctatatctgcggagacggaagccaaatggcacctgccgttgaagcaacgcttatgaaaagctatgctgacgttcaccaagtgagttatgcagacgctcgcttatggctgcagcagctagaagaaaaaggccgatacgcaaaagacgtgtgggctggg

SEQ ID NO: 536 - protein, 1049 aa, synthetic construct
  REGION 1..1049: note = Variant of cytochrome P450
MTIKEMPQPKTFGELKNLPLLNTDKPVQALMRIADELGEIFKFEAPGSVTRFLSSQRLIKEACDERRFDKNLSQSLKFARDFLGDGLFTSWTHEPNWKKAHNILGPSFSQRAMKRYHAMMVDIAVQLVQKWERLNADEHIEVSEDMTRLTLDTIGLCGFNYRFNSFYRDQPHPFIVSVVRALDEVMNKLQRANPDDPAYDENKRQCQEDIKVMNDYVDKIIADRKARGEQSHDLLTQMLNGKDPETGEPLDDGNIRYQIITFLIAGHETTSGLLSFALYFLVKNPHVLQKVAEEAARVLVDPVPSYKQVKQLKYVGMVLNEALRLWPTGPAFSLYAKEDTVLGGEYPLTKGDEVMVLIPQLHRDKTIWGDDVESFRPERFENPSAIPQHAFKPFGNGQRACIGQQFALHEATLVLGMMLKHFDFEDHTNYELVIKERLTLKPEGFVVKAKSKGIPLGLIPSPSTEQSAKKVRKKAENAHNTPLLVLYGSNAGTAEGTARDLADIAMSKGFAPQVATLDSHAGNLPREGAVLIVTASYNGHPPDNAKQFVDWLDQASADEVKGVRYSVFGCGDKNWAATYQKVPAFIDETLAAKGAENIADMGFGDASDDFEGTYEEWSDHMWSDVAAYFNLDIENSEDNKSTLSLQFVDSAADMPLAKMHGAFSTNVVASKELQQPGSARSTRHLEIELPKEASYQEGDHLGVIPRNYEGIVNRVTARFGLSASQQIRLEAEEEKLAHLPLAKTVSVEELLQYVELQDPVTRTQLRAMAAKTVCPPHKVELEALLEKQAYKEQVLAKRLTMLELLEKYPACEMKFSEFIALLPSIRPRYYSISSSPRVDEKQASITVSVVSGDAWSGYGEYKGIASNYLAELQEGDTITCFISTDQSEFTLPKDPEVPLIMVGPGTGVAPFRGFVQARKQLKEQGQSLGEAHLYFGCRSPHEDYLYQEELENAQSEGIITLHTAFSRMPNQPKTYVQHVMEQDGKKLIELLDQGAHFYICGDGSQMAPAVEATLMKSYADVHQVSYADARLWLQQLEEKGRYAKDVWAG

SEQ ID NO: 537 - DNA, 3147 bp, synthetic construct
  misc_feature 1..3147: note = Variant of cytochrome P450
  source 1..3147: mol_type = other DNA
atgacaattaaggaaatgcctcagcctaagacgtttggagaacttaaaaatttaccgttattaaacacagataaaccggttcaagctttgatgcgtattgcggatgaattaggagaaatctttaaattcgaggcgcctggtagcgtaacgcgctttttatcaagtcagcgtctaattaaagaagcatgcgatgaacgtcgctttgataaaaacttaagtcaatcgctgaaatttgcccgtgattttctgggagacgggttatttacaagctggacgcatgaaccgaattggaaaaaagcgcataatatcttaggcccaagctttagtcagcgtgcaatgaaacgttatcatgcgatgatggtcgatatcgccgtgcagcttgttcaaaagtgggagcgtctaaatgcagatgagcatattgaagtatcggaagacatgacacgtttaacgctggatacaattggtctttgcggcttcaactatcgctttaacagcttttaccgagatcagcctcatccatttattgtgtcggtagtgcgtgcactggatgaagtaatgaacaagctgcagcgagcaaatccagacgacccagcttatgatgaaaacaagcgccagtgtcaagaagatatcaaggtgatgaacgactatgtcgataaaattattgcagatcgcaaagcaaggggtgaacaaagccatgatttattaacgcagatgctaaacggaaaagatccagaaacgggtgagccgcttgatgacgggaacattcgttatcaaattattacattcttaatcgcgggacacgaaacaacaagtggtcttttatcatttgcgctgtatttcttagtgaaaaatccacatgtattacaaaaagtagcagaagaagcagcacgagttctagtagatcctgttccaagctacaaacaagtcaaacagcttaaatatgtcggcatggtcttaaacgaagcgctgcgcttatggccaactggtcctgcgttttccctatatgcaaaagaagatacggtgcttggaggagaatatcctttaaccaaaggcgacgaagtaatggttctgattcctcagcttcaccgtgataaaacaatttggggagacgatgtggaggaattccgtccagagcgttttgaaaatccaagtgcgattccgcagcatgcgtttaaaccgtttggaaacggtcagcgtgcgtgtatcggtcagcagttcgctcttcatgaagcaacgctggtacttggtatgatgctaaaacactttgactttgaagatcatacaaactacgagctcgttattaaggaacgcttaacgttaaaacctgaaggctttgtggtaaaagcaaaatcgaaaggcattccgcttggcctgattccttcacctagcactgaacagtctgctaaaaaagtacgcaaaaaggcagaaaacgctcataatacgccgctgcttgtgctatacggttcaaatgcgggaacagctgaaggaacggcgcgtgatttagcagatattgcaatgagcaaaggatttgcaccgcaggtcgcaacgcttgattcacacgccggaaatcttccgcgcgaaggagctgtattaattgtaacggcgtcttataacggtcatccgcctgataacgcaaagcaatttgtcgactggttagaccaagcgtctgctgatgaagtaaaaggcgttcgctactccgtatttggatgcggcgataaaaactgggctgcgacgtatcaaaaagtgcctgcttttatcgatgaaacgcttgccgctaaaggggcagaaaacatcgctgacatgggtgagggtgatgcaagcgacgactttgaaggcacgtatgaagaatggagtgatcatatgtggagtgacgtagcagcctactttaacctcgacattgaaaacagtgaagataataaatctactctttcacttcaatttgtcgacagcgccgcggatatgccgcttgcgaaaatgcacggtgcgttttcaacgaacgtcgtagcaagcaaagaacttcaacagccaggcagtgcacgaagcacgcgacatcttgaaattgaacttccaaaagaagcttcttatcaagaaggagatcatttaggtgttattcctcgcaactatgaaggaatagtaaaccgtgtaacagcaaggttcggcctaagcgcatcacagcagatccgtctggaagcagaagaagaaaaattagctcatttgccactcgctaaaacagtatccgtagaagagcttctgcaatacgtggagcttcaagatcctgttacgcgcacgcagcttcgcgcaatggctgctaaaacggtctgcccgccgcataaagtagagcttgaagccttgcttgaaaagcaagcctacaaagaacaagtgctggcaaaacgtttaacaatgcttgaactgcttgaaaaatacccggcgtgtgaaatgaaattcagcgaatttatcgcccttctgccaagcatacgcccgcgctattactcgatttcttcatcacctcgtgtcgatgaaaaacaagcaagcatcacggtcagcgttgtctcaggaccggcgtggagcggatatggagaatataaaggaattgcgtcgaactatcttgccgagctgcaagaaggagatacgattacgtgctttatttccacagatcagtcagaatttacgctgccaaaagaccctctggtgccgcttatcatggtcggaccgggaacaggcgtcgcgccgtttagaggctttgtgcaggcgcgcaaacagctaaaagaacaaggacagtcacttggagaagcacatttatacttcggctgccgttcacctcatgaagactatctgtatcaagaagagcttgaaaacgcccaaagcgaaggcatcattacgcttcataccgctttttctcgcatgccaaatcagccgaaaacatacgttcagcacgtaatggaacaagacggcaagaaattgattgaacttcttgatcaaggagcgcacttctatatctgcggagacggaagccaaatggcacctgccgttgaagcaacgcttatgaaaagctatgctgacgttcaccaagtgagtgaagcagacgctcgcttatggctgcagcagctagaagaaaaaggccgatacgcaaaagacgtgtgggctggg

SEQ ID NO: 538 - protein, 1049 aa, synthetic construct
  REGION 1..1049: note = Variant of cytochrome P450
MTIKEMPQPKTFGELKNLPLLNTDKPVQALMRIADELGEIFKFEAPGSVTRFLSSQRLIKEACDERRFDKNLSQSLKFARDFLGDGLFTSWTHEPNWKKAHNILGPSFSQRAMKRYHAMMVDIAVQLVQKWERLNADEHIEVSEDMTRLTLDTIGLCGFNYRFNSFYRDQPHPFIVSVVRALDEVMNKLQRANPDDPAYDENKRQCQEDIKVMNDYVDKIIADRKARGEQSHDLLTQMLNGKDPETGEPLDDGNIRYQIITFLIAGHETTSGLLSFALYFLVKNPHVLQKVAEEAARVLVDPVPSYKQVKQLKYVGMVLNEALRLWPTGPAFSLYAKEDTVLGGEYPLTKGDEVMVLIPQLHRDKTIWGDDVEEFRPERFENPSAIPQHAFKPFGNGQRACIGQQFALHEATLVLGMMLKHFDFEDHTNYELVIKERLTLKPEGFVVKAKSKGIPLGLIPSPSTEQSAKKVRKKAENAHNTPLLVLYGSNAGTAEGTARDLADIAMSKGFAPQVATLDSHAGNLPREGAVLIVTASYNGHPPDNAKQFVDWLDQASADEVKGVRYSVFGCGDKNWAATYQKVPAFIDETLAAKGAENIADMGEGDASDDFEGTYEEWSDHMWSDVAAYFNLDIENSEDNKSTLSLQFVDSAADMPLAKMHGAFSTNVVASKELQQPGSARSTRHLEIELPKEASYQEGDHLGVIPRNYEGIVNRVTARFGLSASQQIRLEAEEEKLAHLPLAKTVSVEELLQYVELQDPVTRTQLRAMAAKTVCPPHKVELEALLEKQAYKEQVLAKRLTMLELLEKYPACEMKFSEFIALLPSIRPRYYSISSSPRVDEKQASITVSVVSGPAWSGYGEYKGIASNYLAELQEGDTITCFISTDQSEFTLPKDPLVPLIMVGPGTGVAPFRGFVQARKQLKEQGQSLGEAHLYFGCRSPHEDYLYQEELENAQSEGIITLHTAFSRMPNQPKTYVQHVMEQDGKKLIELLDQGAHFYICGDGSQMAPAVEATLMKSYADVHQVSEADARLWLQQLEEKGRYAKDVWAG

SEQ ID NO: 539 - DNA, 3147 bp, synthetic construct
  misc_feature 1..3147: note = Variant of cytochrome P450
  source 1..3147: mol_type = other DNA
atgacaattaaggaaatgcctcagcctaagacgtttggagaacttaaaaatttaccgttattaaacacagataaaccggttcaagctttgatgcgtattgcggatgaattaggagaaatctttaaattcgaggcgcctggtagcgtaacgcgctttttatcaagtcagcgtctaattaaagaagcatgcgatgaaagtcgctttgataaaaacttaagtcaatcgctgaaatttgcccgtgattttctgggagacgggttatttacaagctggacgcatgaaccgaattggaaaaaagcgcataatatcttaggcccaagctttagtcagctggcaatgcgccgttatcatgcgatgatggtcgatatcgccgtgcagcttgttcaaaagtgggagcgtctaaatgcagatgagcatattgaagtatcggaagacatgacacgtttaacgctggatacaattggtctttgcggcttcaactatcgctttaacagcttttaccgagatcagcctcatccatttattgtgtcggtagtgcgtctgctggatgaagtcatgaacaagctgcagcgagcaaatccagacgacccagcttatgatgaaaacaagcgccagtgtcaagaagatatcaaggtgatgaacgactatgtcgataaaattattgcagatcgcaaagcaaggggtgaacaaagccatgatttattaacgcagatgctaaacggaaaagatccagaaacgggtgagccgcttgatgacgggaacattcgttatcaaattattacattcttaatcgcgggacacgaaacaacaagtggtcttttatcatttgcgctgtatttcttagtgaaaaatccacatgtattacaaaaagtagcagaagaagcagcacgagttctagtagatcctgttccaagctacaaacaagtcaaacagcttaaatatgtcggcatggtcttaaacgaagcgctgcgcttatggccaactggtcctgcgttttccctatatgcaaaagaagatacggtgcttggaggagaatatcctttaaccaaaggcgacgaagtaatggttctgattcctcagcttcaccgtgataaaacaatttggggagacgatgtggagtcgttccgtccagagcgttttgaaaatccaagtgcgattccgcagcatgcgtttaaaccgtttggaaacggtcagcgtgcgtgtatcggtcagcagttcgctcttcatgaagcaacgctggtacttggtatgatgctaaaacactttgactttgaagatcatacaaactacgagctcgttattaaggaacgcttaacgttaaaacctgaaggctttgtggtaaaagcaaaatcgaaaggcattccgcttggcctgattccttcacctagcactgaacagtctgctaaaaaagtacgcaaaaaggcagaaaacgctcataatacgccgctgcttgtgctatacggttcaaatgcgggaacagctgaaggaacggcgcgtgatttagcagatattgcaatgagcaaaggatttgcaccgcaggtcgcaacgcttgattcacacgccggaaatcttccgcgcgaaggagctgtattaattgtaacggcgtcttataacggtcatccgcctgataacgcaaagcaatttgtcgactggttagaccaagcgtctgctgatgaagtaaaaggcgttcgctactccgtatttggatgcggcgataaaaactgggctgcgacgtatcaaaaagtgcctgcttttatcgatgaaacgcttgccgctaaaggggcagaaaacatcgctgaccgcggtgaagcagatgcaagcgacgactttgaaggcacgtatgaagaatggagtgatcatatgtggagtgacgtagcagcctactttaacctcgacattgaaaacagtgaagataataaatctactctttcacttcaatttgtcgacagcgccgcggatatgccgcttgcgaaaatgcacggtgcgttttcaacgaacgtcgtagcaagcaaagaacttcaacagccaggcagtgcacgaagcacgcgacatcttgaaattgaacttccaaaagaagcttcttatcaagaaggagatcatttaggtgttattcctcgcaactatgaaggaatagtaaaccgtgtaacagcaaggttcggcctaagcgcatcacagcaaatccgtctggaagcagaagaagaaaaattagctcatttgccactcgctaaaacagtatccgtagaagagcttctgcaatacgtggagcttcaagatcctgttacgcgcacgcagcttcgcgcaatggctgctaaaacggtctgcccgccgcataaagtagagcttgaagccttgcttgaaaagcaagcctacaaagaacaagtgctggcaaaacgtttaacaatgcttgaactgcttgaaaaatacccggcgtgtgaaatgaaattcagcgaatttatcgcccttctgccaagcatacgcccgcgctattactcgatttcttcatcacctcgtgtcgatgaaaaacaagcaagcatcacggtcagcgttgtctcaggaccagcgtggagcggatatggagaatataaaggaattgcgtcgaactatcttgccgagctgcaagaaggagatacgattacgtgctttatttccacagatcagtcagaatttacgctgccaaaagaccctgaaacgccgcttatcatggtcggaccgggaacaggcgtcgcgccgtttagaggctttgtgcaggcgcgcaaacagctaaaagaacaaggacagtcacttggagaagcacatttatacttcggctgccgttcacctcatgaagactatctgtatcaagaagagcttgaaaacgcccaaagcgaaggcatcattacgcttcataccgctttttctcgcatgccaaatcagccgaaaacatacgttcagcacgtaatggaacaagacggcaagaaattgattgaacttcttgatcaaggagcgcacttctatatctgcggagacggaagccaaatggcacctgccgttgaagcaacgcttatgaaaagctatgctgacgttcaccaagtgagtgaagcagacgctcgcttatggctgcagcagctagaagaaaaaggccgatacgcaaaagacgtgtgggctggg

SEQ ID NO: 540 - protein, 1049 aa, synthetic construct
  REGION 1..1049: note = Variant of cytochrome P450
MTIKEMPQPKTFGELKNLPLLNTDKPVQALMRIADELGEIFKFEAPGSVTRFLSSQRLIKEACDESRFDKNLSQSLKFARDFLGDGLFTSWTHEPNWKKAHNILGPSFSQLAMRRYHAMMVDIAVQLVQKWERLNADEHIEVSEDMTRLTLDTIGLCGFNYRFNSFYRDQPHPFIVSVVRLLDEVMNKLQRANPDDPAYDENKRQCQEDIKVMNDYVDKIIADRKARGEQSHDLLTQMLNGKDPETGEPLDDGNIRYQIITFLIAGHETTSGLLSFALYFLVKNPHVLQKVAEEAARVLVDPVPSYKQVKQLKYVGMVLNEALRLWPTGPAFSLYAKEDTVLGGEYPLTKGDEVMVLIPQLHRDKTIWGDDVESFRPERFENPSAIPQHAFKPFGNGQRACIGQQFALHEATLVLGMMLKHFDFEDHTNYELVIKERLTLKPEGFVVKAKSKGIPLGLIPSPSTEQSAKKVRKKAENAHNTPLLVLYGSNAGTAEGTARDLADIAMSKGFAPQVATLDSHAGNLPREGAVLIVTASYNGHPPDNAKQFVDWLDQASADEVKGVRYSVFGCGDKNWAATYQKVPAFIDETLAAKGAENIADRGEADASDDFEGTYEEWSDHMWSDVAAYFNLDIENSEDNKSTLSLQFVDSAADMPLAKMHGAFSTNVVASKELQQPGSARSTRHLEIELPKEASYQEGDHLGVIPRNYEGIVNRVTARFGLSASQQIRLEAEEEKLAHLPLAKTVSVEELLQYVELQDPVTRTQLRAMAAKTVCPPHKVELEALLEKQAYKEQVLAKRLTMLELLEKYPACEMKFSEFIALLPSIRPRYYSISSSPRVDEKQASITVSVVSGPAWSGYGEYKGIASNYLAELQEGDTITCFISTDQSEFTLPKDPETPLIMVGPGTGVAPFRGFVQARKQLKEQGQSLGEAHLYFGCRSPHEDYLYQEELENAQSEGIITLHTAFSRMPNQPKTYVQHVMEQDGKKLIELLDQGAHFYICGDGSQMAPAVEATLMKSYADVHQVSEADARLWLQQLEEKGRYAKDVWAG

SEQ ID NO: 541 - DNA, 3147 bp, synthetic construct
  misc_feature 1..3147: note = Variant of cytochrome P450
  source 1..3147: mol_type = other DNA
atgacaattaaggaaatgcctcagcctaagacgtttggagaacttaaaaatttaccgttattaaacacagataaaccggttcaagctttgatgcgtattgcggatgaattaggagaaatctttaaattcgaggcgcctggtagcgtaacgcgctttttatcaagtcagcgtctaattaaagaagcatgcgatgaatcacgctttgataaaaacttaagtcaaggccttaaatttgcacgtgattttcttggagacgggttatttacaagctggacgcatgaaccgaattggaaaaaagcgcataatatcttaggcccaagctttagtcagcgtgcaatgaaacgttatcatgcgatgatggtcgatatcgccgtgcagcttgttcaaaagtgggagcgtctaaatgcagatgagcatattgaagtatcggaagacatgacacgtttaacgctggatacaattggtctttgcggcttcaactatcgctttaacagcttttaccgagatcagcctcatccatttattgtgagtgttgtgcgtgcactggatgaagtaatgaacaagctgcagcgagcaaatccagacgacccagcttatgatgaaaacaagcgccagtgtcaagaagatatcaaggtgatgaacgactatgtcgataaaattattgcagatcgcaaagcaaggggtgaacaaagccatgatttattaacgcagatgctaaacggaaaagatccagaaacgggtgagccgcttgatgacgggaacattcgttatcaaattattacattcttaattgcgggacacgaaacaacaagtggtcttttatcatttgcgctgtatttcttagtgaaaaatccacatgtattacaaaaagtagcagaagaagcagcacgagttctagtagatcctgttccaagctacaaacaagtcaaacagcttaaatatgtcggcatggtcttaaacgaagcgctgcgcttatggccaactgctcctgcgttttccctatatgcaaaagaagatacggtgcttggaggagaatatcctttaaccaaaggcgacgaagtaatggttctgattcctcagcttcaccgtgataaaacaatttggggagacgatgtggaggagttccgtccagagcgttttgaaaatccaagtgcgattccgcagcatgcgtttaaaccgtttggaaacggtcagcgtgcgtgtatcggtcagcagttcgctcttcatgaagcaacgctggtacttggtatgatgctaaaacactttgactttgaagatcatacaaactacgagctcgttattaaagaaaatttaacgttaaaacctgaaggctttgtggtaaaagcaaaatcgaaaggcattccgcttggcggtattccttcacctagcactgaacagtctgctaaaaaagtacgcaaaaaggcagaaaacgctcataatacgccgctgcttgtgctatacggttcaaatgcgggaacagctgaaggaacggcgcgtgatttagcagatattgcaatgagcaaaggatttgcaccgcaggtcgcaacgcttgattcacacgccggaaatcttccgcgcgaaggagctgtattaattgtaacggcgtcttataacggtcatccgcctgataacgcaaagcaatttgtcgactggttagaccaagcgtctgctgatgaagtaaaaggcgttcgctactccgtatttggatgcggcgataaaaactgggctgcgacgtatcaaaaagtgcctgcttttatcgatgaaacgcttgccgctaaaggggcagaaaacatcgctgaccgcggtgaagcagatgcaagcgacgactttgaaggcacatatgaagaatggagtgatcatatgtggagtgacgtagcagcctactttaacctcgacattgaaaacagtgaagataataaatctactctttcacttcaatttgtcgacagcgccgcggatatgccgcttgcgaaaatgcacggtgcgttttcaacgaacgtcgtagcaagcaaagaacttcaacagccaggcagtgcacgaagcacgcgacatcttgaaattgaacttccaaaagaagcttcttatcaagaaggagatcatttaggtgttattcctcgcaactatgaaggaatagtaaaccgtgtaacagcaaggttcggcctaagcgcatcacagcaaatccgtctggaagcagaagaagaaaaattagctcatttgccactcgctaaaacagtatccgtagaagagcttctgcaatacgtggagcttcaagatcctgttacgcgcacgcagcttcgcgcaatggctgctaaaacggtctgcccgccgcataaagtagagcttgaagccttgcttgaaaagcaagcctacaaagaacaagtgctggcaaaacgtttaacaatgcttgaactgcttgaaaaatacccggcgtgtgaaatgaaattcagcgaatttatcgcccttctgccaagcatacgcccgcgctattactcgatttcttcatcacctcgtgtcgatgaaaaacaagcaagcatcacggtcagcgttgtctcaggaccggcgtggagcggatatggagaatataaaggaattgcgtcgaactatcttgccgagctgcaagaaggagatacgattacgtgctttatttccacagatcagtcagaatttacgctgccaaaagaccctgaaacgccgcttatcatggtcggaccgggaacaggcgtcgcgccgtttagaggctttgtgcaggcgcgcaaacagctaaaagaacaaggacagtcacttggagaagcacatttatacttcggctgccgttcacctcatgaagactatctgtatcaagaagagcttgaaaacgcccaaagcgaaggcatcattacgcttcataccgctttttctcgcatgccaaatcagccgaaaacatacgttcagcacgtaatggaacaagacggcaagaaattgattgaacttcttgatcaaggagcgcacttctatatttgcggagacggaagccaaatggcacctgccgttgaagcaacgcttatgaaaagctatgctgacgttcaccaagtgagtgaagcagacgctcgcttatggctgcagcagctagaagaaaaaggccgatacgcaaaagacgtgtgggctggg

SEQ ID NO: 542 - protein, 1049 aa, synthetic construct
  REGION 1..1049: note = Variant of cytochrome P450
MTIKEMPQPKTFGELKNLPLLNTDKPVQALMRIADELGEIFKFEAPGSVTRFLSSQRLIKEACDESRFDKNLSQGLKFARDFLGDGLFTSWTHEPNWKKAHNILGPSFSQRAMKRYHAMMVDIAVQLVQKWERLNADEHIEVSEDMTRLTLDTIGLCGFNYRFNSFYRDQPHPFIVSVVRALDEVMNKLQRANPDDPAYDENKRQCQEDIKVMNDYVDKIIADRKARGEQSHDLLTQMLNGKDPETGEPLDDGNIRYQIITFLIAGHETTSGLLSFALYFLVKNPHVLQKVAEEAARVLVDPVPSYKQVKQLKYVGMVLNEALRLWPTAPAFSLYAKEDTVLGGEYPLTKGDEVMVLIPQLHRDKTIWGDDVEEFRPERFENPSAIPQHAFKPFGNGQRACIGQQFALHEATLVLGMMLKHFDFEDHTNYELVIKENLTLKPEGFVVKAKSKGIPLGGIPSPSTEQSAKKVRKKAENAHNTPLLVLYGSNAGTAEGTARDLADIAMSKGFAPQVATLDSHAGNLPREGAVLIVTASYNGHPPDNAKQFVDWLDQASADEVKGVRYSVFGCGDKNWAATYQKVPAFIDETLAAKGAENIADRGEADASDDFEGTYEEWSDHMWSDVAAYFNLDIENSEDNKSTLSLQFVDSAADMPLAKMHGAFSTNVVASKELQQPGSARSTRHLEIELPKEASYQEGDHLGVIPRNYEGIVNRVTARFGLSASQQIRLEAEEEKLAHLPLAKTVSVEELLQYVELQDPVTRTQLRAMAAKTVCPPHKVELEALLEKQAYKEQVLAKRLTMLELLEKYPACEMKFSEFIALLPSIRPRYYSISSSPRVDEKQASITVSVVSGPAWSGYGEYKGIASNYLAELQEGDTITCFISTDQSEFTLPKDPETPLIMVGPGTGVAPFRGFVQARKQLKEQGQSLGEAHLYFGCRSPHEDYLYQEELENAQSEGIITLHTAFSRMPNQPKTYVQHVMEQDGKKLIELLDQGAHFYICGDGSQMAPAVEATLMKSYADVHQVSEADARLWLQQLEEKGRYAKDVWAG

SEQ ID NO: 543 - DNA, 3147 bp, synthetic construct
  misc_feature 1..3147: note = Variant of cytochrome P450
  source 1..3147: mol_type = other DNA
atgacaattaaggaaatgcctcagcctaagacgtttggagaacttaaaaatttaccgttattaaacacagataaaccggttcaagctttgatgcgtattgcggatgaattaggagaaatctttaaattcgaggcgcctggtagcgtaacgcgctttttatcaagtcagcgtctaattaaagaagcatgcgatgaatcacgctttgataaaaacttaagtcaaggccttaaatttgcacgtgattttcttggagacgggttatttacaagctggacgcatgaaccgaattggaaaaaagcgcataatatcttaggcccaagctttagtcagcgtgcaatgaaacgttatcatgcgatgatggtcgatatcgccgtgcagcttgttcaaaagtgggagcgtctaaatgcagatgagcatattgaagtatcggaagacatgacacgtttaacgctggatacaattggtctttgcggcttcaactatcgctttaacagcttttaccgagatcagcctcatccatttattgtgagtgttgggcgtgcactggatgaagtaatgaacaagctgcagcgagcaaatccagacgacccagcttatgatgaaaacaagcgccagtgtcaagaagatatcaaggtgatgaacgactatgtcgataaaattattgcagatcgcaaagcaaggggtgaacaaagccatgatttattaacgcagatgctaaacggaaaagatccagaaacgggtgagccgcttgatgacgggaacattcgttatcaaattattacattcttaattgcgggacacgaaacaacaagtggtcttttatcatttgcgctgtatttcttagtgaaaaatccacatgtattacaaaaagtagcagaagaagcagcacgagttctagtagatcctgttccaagctacaaacaagtcaaacagcttaaatatgtcggcatggtcttaaacgaagcgctgcgcttatggccaactgctcctgcgttttccctatatgcaaaagaagatacggtgcttggaggagaatatcctttaaccaaaggcgacgaagtaatggttctgattcctcagcttcaccgtgataaaacaatttggggagacgatgtggaggagttccgtccagagcgttttgaaaatccaagtgcgattccgcagcatgcgtttaaaccgtttggaaacggtcagcgtgcgtgtatcggtcagcagttcgctcttcatgaagcaacgctggtacttggtatgatgctaaaacactttgactttgaagatcatacaaactacgagctcgttattaaagaaaagttaacgttaaaacctgaaggctttgtggtaaaagcaaaatcgaaaggcattccgcttggcggtattccttcacctagcactgaacagtctgctaaaaaagtacgcaaaaaggcagaaaacgctcataatacgccgctgcttgtgctatacggttcaaatgcgggaacagctgaaggaacggcgcgtgatttagcagatattgcaatgagcaaaggatttgcaccgcaggtcgcaacgcttgattcacacgccggaaatcttccgcgcgaaggagctgtattaattgtaacggcgtcttataacggtcatccgcctgataacgcaaagcaatttgtcgactggttagaccaagcgtctgctgatgaagtaaaaggcgttcgctactccgtatttggatgcggcgataaaaactgggctgcgacgtatcaaaaagtgcctgcttttatcgatgaaacgcttgccgctaaaggggcagaaaacatcgctgaccgcggtgaagcagatgcaagcgacgactttgaaggcacatatgaagaatggagtgatcatatgtggagtgacgtagcagcctactttaacctcgacattgaaaacagtgaagataataaatctactctttcacttcaatttgtcgacagcgccgcggatatgccgcttgcgaaaatgcacggtgcgttttcaacgaacgtcgtagcaagcaaagaacttcaacagccaggcagtgcacgaagcacgcgacatcttgaaattgaacttccaaaagaagcttcttatcaagaaggagatcatttaggtgttattcctcgcaactatgaaggaatagtaaaccgtgtaacagcaaggttcggcctaagcgcatcacagcaaatccgtctggaagcagaagaagaaaaattagctcatttgccactcgctaaaacagtatccgtagaagagcttctgcaatacgtggagcttcaagatcctgttacgcgcacgcagcttcgcgcaatggctgctaaaacggtctgcccgccgcataaagtagagcttgaagccttgcttgaaaagcaagcctacaaagaacaagtgctggcaaaacgtttaacaatgcttgaactgcttgaaaaatacccggcgtgtgaaatgaaattcagcgaatttatcgcccttctgccaagcatacgcccgcgctattactcgatttcttcatcacctcgtgtcgatgaaaaacaagcaagcatcacggtcagcgttgtctcaggaccggcgtggagcggatatggagaatataaaggaattgcgtcgaactatcttgccgagctgcaagaaggagatacgattacgtgctttatttccacagatcagtcagaatttacgctgccaaaagaccctgaaacgccgcttatcatggtcggaccgggaacaggcgtcgcgccgtttagaggctttgtgcaggcgcgcaaacagctaaaagaacaaggacagtcacttggagaagcacatttatacttcggctgccgttcacctcatgaagactatctgtatcaagaagagcttgaaaacgcccaaagcgaaggcatcattacgcttcataccgctttttctcgcatgccaaatcagccgaaaacatacgttcagcacgtaatggaacaagacggcaagaaattgattgaacttcttgatcaaggagcgcacttctatatttgcggagacggaagccaaatggcacctgccgttgaagcaacgcttatgaaaagctatgctgacgttcaccaagtgagtgaagcagacgctcgcttatggctgcagcagctagaagaaaaaggccgatacgcaaaagacgtgtgggctggg

SEQ ID NO: 544 - protein, 1049 aa, synthetic construct
  REGION 1..1049: note = Variant of cytochrome P450
MTIKEMPQPKTFGELKNLPLLNTDKPVQALMRIADELGEIFKFEAPGSVTRFLSSQRLIKEACDESRFDKNLSQGLKFARDFLGDGLFTSWTHEPNWKKAHNILGPSFSQRAMKRYHAMMVDIAVQLVQKWERLNADEHIEVSEDMTRLTLDTIGLCGFNYRFNSFYRDQPHPFIVSVGRALDEVMNKLQRANPDDPAYDENKRQCQEDIKVMNDYVDKIIADRKARGEQSHDLLTQMLNGKDPETGEPLDDGNIRYQIITFLIAGHETTSGLLSFALYFLVKNPHVLQKVAEEAARVLVDPVPSYKQVKQLKYVGMVLNEALRLWPTAPAFSLYAKEDTVLGGEYPLTKGDEVMVLIPQLHRDKTIWGDDVEEFRPERFENPSAIPQHAFKPFGNGQRACIGQQFALHEATLVLGMMLKHFDFEDHTNYELVIKEKLTLKPEGFVVKAKSKGIPLGGIPSPSTEQSAKKVRKKAENAHNTPLLVLYGSNAGTAEGTARDLADIAMSKGFAPQVATLDSHAGNLPREGAVLIVTASYNGHPPDNAKQFVDWLDQASADEVKGVRYSVFGCGDKNWAATYQKVPAFIDETLAAKGAENIADRGEADASDDFEGTYEEWSDHMWSDVAAYFNLDIENSEDNKSTLSLQFVDSAADMPLAKMHGAFSTNVVASKELQQPGSARSTRHLEIELPKEASYQEGDHLGVIPRNYEGIVNRVTARFGLSASQQIRLEAEEEKLAHLPLAKTVSVEELLQYVELQDPVTRTQLRAMAAKTVCPPHKVELEALLEKQAYKEQVLAKRLTMLELLEKYPACEMKFSEFIALLPSIRPRYYSISSSPRVDEKQASITVSVVSGPAWSGYGEYKGIASNYLAELQEGDTITCFISTDQSEFTLPKDPETPLIMVGPGTGVAPFRGFVQARKQLKEQGQSLGEAHLYFGCRSPHEDYLYQEELENAQSEGIITLHTAFSRMPNQPKTYVQHVMEQDGKKLIELLDQGAHFYICGDGSQMAPAVEATLMKSYADVHQVSEADARLWLQQLEEKGRYAKDVWAG

SEQ ID NO: 545 - DNA, 3147 bp, synthetic construct
  misc_feature 1..3147: note = Variant of cytochrome P450
  source 1..3147: mol_type = other DNA
atgacaattaaggaaatgcctcagcctaagacgtttggagaacttaaaaatttaccgttattaaacacagataaaccggttcaagctttgatgcgtattgcggatgaattaggagaaatctttaaattcgaggcgcctggtagcgtaacgcgctttttatcaagtcagcgtctaattaaagaagcatgcgatgaatcacgctttgataaaaacttaagtcaaggccttaaatttgcacgtgattttcttggagacgggttatttacaagctggacgcatgaaccgaattggaaaaaagcgcataatatcttaggcccaagctttagtcagcgtgcaatgaaacgttatcatgcgatgatggtcgatatcgccgtgcagcttgttcaaaagtgggagcgtctaaatgcagatgagcatattgaagtatcggaagacatgacacgtttaacgctggatacaattggtctttgcggcttcaactatcgctttaacagcttttaccgagatcagcctcatccatttattgtgagtgttgagcgtgcactggatgaagtaatgaacaagctgcagcgagcaaatccagacgacccagcttatgatgaaaacaagcgccagtgtcaagaagatatcaaggtgatgaacgactatgtcgataaaattattgcagatcgcaaagcaaggggtgaacaaagccatgatttattaacgcagatgctaaacggaaaagatccagaaacgggtgagccgcttgatgacgggaacattcgttatcaaattattacattcttaattgcgggacacgaaacaacaagtggtcttttatcatttgcgctgtatttcttagtgaaaaatccacatgtattacaaaaagtagcagaagaagcagcacgagttctagtagatcctgttccaagctacaaacaagtcaaacagcttaaatatgtcggcatggtcttaaacgaagcgctgcgcttatggccaactgctcctgcgttttccctatatgcaaaagaagatacggtgcttggaggagaatatcctttaaccaaaggcgacgaagtaatggttctgattcctcagcttcaccgtgataaaacaatttggggagacgatgtggaggagttccgtccagagcgttttgaaaatccaagtgcgattccgcagcatgcgtttaaaccgtttggaaacggtcagcgtgcgtgtatcggtcagcagttcgctcttcatgaagcaacgctggtacttggtatgatgctaaaacactttgactttgaagatcatacaaactacgagctcgttattaaagaaaagttaacgttaaaacctgaaggctttgtggtaaaagcaaaatcgaaaggcattccgcttggcggtattccttcacctagcactgaacagtctgctaaaaaagtacgcaaaaaggcagaaaacgctcataatacgccgctgcttgtgctatacggttcaaatgcgggaacagctgaaggaacggcgcgtgatttagcagatattgcaatgagcaaaggatttgcaccgcaggtcgcaacgcttgattcacacgccggaaatcttccgcgcgaaggagctgtattaattgtaacggcgtcttataacggtcatccgcctgataacgcaaagcaatttgtcgactggttagaccaagcgtctgctgatgaagtaaaaggcgttcgctactccgtatttggatgcggcgataaaaactgggctgcgacgtatcaaaaagtgcctgcttttatcgatgaaacgcttgccgctaaaggggcagaaaacatcgctgaccgcggtgaagcagatgcaagcgacgactttgaaggcacatatgaagaatggagtgatcatatgtggagtgacgtagcagcctactttaacctcgacattgaaaacagtgaagataataaatctactctttcacttcaatttgtcgacagcgccgcggatatgccgcttgcgaaaatgcacggtgcgttttcaacgaacgtcgtagcaagcaaagaacttcaacagccaggcagtgcacgaagcacgcgacatcttgaaattgaacttccaaaagaagcttcttatcaagaaggagatcatttaggtgttattcctcgcaactatgaaggaatagtaaaccgtgtaacagcaaggttcggcctaagcgcatcacagcaaatccgtctggaagcagaagaagaaaaattagctcatttgccactcgctaaaacagtatccgtagaagagcttctgcaatacgtggagcttcaagatcctgttacgcgcacgcagcttcgcgcaatggctgctaaaacggtctgcccgccgcataaagtagagcttgaagccttgcttgaaaagcaagcctacaaagaacaagtgctggcaaaacgtttaacaatgcttgaactgcttgaaaaatacccggcgtgtgaaatgaaattcagcgaatttatcgcccttctgccaagcatacgcccgcgctattactcgatttcttcatcacctcgtgtcgatgaaaaacaagcaagcatcacggtcagcgttgtctcaggaccggcgtggagcggatatggagaatataaaggaattgcgtcgaactatcttgccgagctgcaagaaggagatacgattacgtgctttatttccacagatcagtcagaatttacgctgccaaaagaccctgaaacgccgcttatcatggtcggaccgggaacaggcgtcgcgccgtttagaggctttgtgcaggcgcgcaaacagctaaaagaacaaggacagtcacttggagaagcacatttatacttcggctgccgttcacctcatgaagactatctgtatcaagaagagcttgaaaacgcccaaagcgaaggcatcattacgcttcataccgctttttctcgcatgccaaatcagccgaaaacatacgttcagcacgtaatggaacaagacggcaagaaattgattgaacttcttgatcaaggagcgcacttctatatttgcggagacggaagccaaatggcacctgccgttgaagcaacgcttatgaaaagctatgctgacgttcaccaagtgagtgaagcagacgctcgcttatggctgcagcagctagaagaaaaaggccgatacgcaaaagacgtgtgggctggg

SEQ ID NO: 546 - protein, 1049 aa, synthetic construct
  REGION 1..1049: note = Variant of cytochrome P450
MTIKEMPQPKTFGELKNLPLLNTDKPVQALMRIADELGEIFKFEAPGSVTRFLSSQRLIKEACDESRFDKNLSQGLKFARDFLGDGLFTSWTHEPNWKKAHNILGPSFSQRAMKRYHAMMVDIAVQLVQKWERLNADEHIEVSEDMTRLTLDTIGLCGFNYRFNSFYRDQPHPFIVSVERALDEVMNKLQRANPDDPAYDENKRQCQEDIKVMNDYVDKIIADRKARGEQSHDLLTQMLNGKDPETGEPLDDGNIRYQIITFLIAGHETTSGLLSFALYFLVKNPHVLQKVAEEAARVLVDPVPSYKQVKQLKYVGMVLNEALRLWPTAPAFSLYAKEDTVLGGEYPLTKGDEVMVLIPQLHRDKTIWGDDVEEFRPERFENPSAIPQHAFKPFGNGQRACIGQQFALHEATLVLGMMLKHFDFEDHTNYELVIKEKLTLKPEGFVVKAKSKGIPLGGIPSPSTEQSAKKVRKKAENAHNTPLLVLYGSNAGTAEGTARDLADIAMSKGFAPQVATLDSHAGNLPREGAVLIVTASYNGHPPDNAKQFVDWLDQASADEVKGVRYSVFGCGDKNWAATYQKVPAFIDETLAAKGAENIADRGEADASDDFEGTYEEWSDHMWSDVAAYFNLDIENSEDNKSTLSLQFVDSAADMPLAKMHGAFSTNVVASKELQQPGSARSTRHLEIELPKEASYQEGDHLGVIPRNYEGIVNRVTARFGLSASQQIRLEAEEEKLAHLPLAKTVSVEELLQYVELQDPVTRTQLRAMAAKTVCPPHKVELEALLEKQAYKEQVLAKRLTMLELLEKYPACEMKFSEFIALLPSIRPRYYSISSSPRVDEKQASITVSVVSGPAWSGYGEYKGIASNYLAELQEGDTITCFISTDQSEFTLPKDPETPLIMVGPGTGVAPFRGFVQARKQLKEQGQSLGEAHLYFGCRSPHEDYLYQEELENAQSEGIITLHTAFSRMPNQPKTYVQHVMEQDGKKLIELLDQGAHFYICGDGSQMAPAVEATLMKSYADVHQVSEADARLWLQQLEEKGRYAKDVWAG

SEQ ID NO: 547 - DNA, 3147 bp, synthetic construct
  misc_feature 1..3147: note = Variant of cytochrome P450
  source 1..3147: mol_type = other DNA
atgacaattaaggaaatgcctcagcctaagacgtttggagaacttaaaaatttaccgttattaaacacagataaaccggttcaagctttgatgcgtattgcggatgaattaggagaaatctttaaattcgaggcgcctggtagcgtaacgcgctttttatcaagtcagcgtctaattaaagaagcatgcgatgaatcacgctttgataaaaacttaagtcaaggccttaaatttgcacgtgattttcttggagacgggttatttacaagctggacgcatgaaccgaattggaaaaaagcgcataatatcttaggcccaagctttagtcagcgtgcaatgaaacgttatcatgcgatgatggtcgatatcgccgtgcagcttgttcaaaagtgggagcgtctaaatgcagatgagcatattgaagtatcggaagacatgacacgtttaacgctggatacaattggtctttgcggcttcaactatcgctttaacagcttttaccgagatcagcctcatccatttattgtgagtgttgtgcgtgcactggatgaagtaatgaacaagctgcagcgagcaaatccagacgacccagcttatgatgaaaacaagcgccagtgtcaagaagatatcaaggtgatgaacgactatgtcgataaaattattgcagatcgcaaagcaaggggtgaacaaagccatgatttattaacgcagatgctaaacggaaaagatccagaaacgggtgagccgcttgatgacgggaacattcgttatcaaattattacattcttaattgcgggacacgaaacaacaagtggtcttttatcatttgcgctgtatttcttagtgaaaaatccacatgtattacaaaaagtagcagaagaagcagcacgagttctagtagatcctgttccaagctacaaacaagtcaaacagcttaaatatgtcggcatggtcttaaacgaagcgctgcgcttatggccaactgctcctgcgttttccctatatgcaaaagaagatacggtgcttggaggagaatatcctttaaccaaaggcgacgaagtaatggttctgattcctcagcttcaccgtgataaaacaatttggggagacgatgtggaggagttccgtccagagcgttttgaaaatccaagtgcgattccgcagcatgcgtttaaaccgtttggaaacggtcagcgtgcgtgtatcggtcagcagttcgctcttcatgaagcaacgctggtacttggtatgatgctaaaacactttgactttgaagatcatacaaactacgagctcgttattaaagaaatgttaacgttaaaacctgaaggctttgtggtaaaagcaaaatcgaaaggcattccgcttggcggtattccttcacctagcactgaacagtctgctaaaaaagtacgcaaaaaggcagaaaacgctcataatacgccgctgcttgtgctatacggttcaaatgcgggaacagctgaaggaacggcgcgtgatttagcagatattgcaatgagcaaaggatttgcaccgcaggtcgcaacgcttgattcacacgccggaaatcttccgcgcgaaggagctgtattaattgtaacggcgtcttataacggtcatccgcctgataacgcaaagcaatttgtcgactggttagaccaagcgtctgctgatgaagtaaaaggcgttcgctactccgtatttggatgcggcgataaaaactgggctgcgacgtatcaaaaagtgcctgcttttatcgatgaaacgcttgccgctaaaggggcagaaaacatcgctgaccgcggtgaagcagatgcaagcgacgactttgaaggcacatatgaagaatggagtgatcatatgtggagtgacgtagcagcctactttaacctcgacattgaaaacagtgaagataataaatctactctttcacttcaatttgtcgacagcgccgcggatatgccgcttgcgaaaatgcacggtgcgttttcaacgaacgtcgtagcaagcaaagaacttcaacagccaggcagtgcacgaagcacgcgacatcttgaaattgaacttccaaaagaagcttcttatcaagaaggagatcatttaggtgttattcctcgcaactatgaaggaatagtaaaccgtgtaacagcaaggttcggcctaagcgcatcacagcaaatccgtctggaagcagaagaagaaaaattagctcatttgccactcgctaaaacagtatccgtagaagagcttctgcaatacgtggagcttcaagatcctgttacgcgcacgcagcttcgcgcaatggctgctaaaacggtctgcccgccgcataaagtagagcttgaagccttgcttgaaaagcaagcctacaaagaacaagtgctggcaaaacgtttaacaatgcttgaactgcttgaaaaatacccggcgtgtgaaatgaaattcagcgaatttatcgcccttctgccaagcatacgcccgcgctattactcgatttcttcatcacctcgtgtcgatgaaaaacaagcaagcatcacggtcagcgttgtctcaggaccggcgtggagcggatatggagaatataaaggaattgcgtcgaactatcttgccgagctgcaagaaggagatacgattacgtgctttatttccacagatcagtcagaatttacgctgccaaaagaccctgaaacgccgcttatcatggtcggaccgggaacaggcgtcgcgccgtttagaggctttgtgcaggcgcgcaaacagctaaaagaacaaggacagtcacttggagaagcacatttatacttcggctgccgttcacctcatgaagactatctgtatcaagaagagcttgaaaacgcccaaagcgaaggcatcattacgcttcataccgctttttctcgcatgccaaatcagccgaaaacatacgttcagcacgtaatggaacaagacggcaagaaattgattgaacttcttgatcaaggagcgcacttctatatttgcggagacggaagccaaatggcacctgccgttgaagcaacgcttatgaaaagctatgctgacgttcaccaagtgagtgaagcagacgctcgcttatggctgcagcagctagaagaaaaaggccgatacgcaaaagacgtgtgggctggg

SEQ ID NO: 548 - protein, 1049 aa, synthetic construct
  REGION 1..1049: note = Variant of cytochrome P450
MTIKEMPQPKTFGELKNLPLLNTDKPVQALMRIADELGEIFKFEAPGSVTRFLSSQRLIKEACDESRFDKNLSQGLKFARDFLGDGLFTSWTHEPNWKKAHNILGPSFSQRAMKRYHAMMVDIAVQLVQKWERLNADEHIEVSEDMTRLTLDTIGLCGFNYRFNSFYRDQPHPFIVSVVRALDEVMNKLQRANPDDPAYDENKRQCQEDIKVMNDYVDKIIADRKARGEQSHDLLTQMLNGKDPETGEPLDDGNIRYQIITFLIAGHETTSGLLSFALYFLVKNPHVLQKVAEEAARVLVDPVPSYKQVKQLKYVGMVLNEALRLWPTAPAFSLYAKEDTVLGGEYPLTKGDEVMVLIPQLHRDKTIWGDDVEEFRPERFENPSAIPQHAFKPFGNGQRACIGQQFALHEATLVLGMMLKHFDFEDHTNYELVIKEMLTLKPEGFVVKAKSKGIPLGGIPSPSTEQSAKKVRKKAENAHNTPLLVLYGSNAGTAEGTARDLADIAMSKGFAPQVATLDSHAGNLPREGAVLIVTASYNGHPPDNAKQFVDWLDQASADEVKGVRYSVFGCGDKNWAATYQKVPAFIDETLAAKGAENIADRGEADASDDFEGTYEEWSDHMWSDVAAYFNLDIENSEDNKSTLSLQFVDSAADMPLAKMHGAFSTNVVASKELQQPGSARSTRHLEIELPKEASYQEGDHLGVIPRNYEGIVNRVTARFGLSASQQIRLEAEEEKLAHLPLAKTVSVEELLQYVELQDPVTRTQLRAMAAKTVCPPHKVELEALLEKQAYKEQVLAKRLTMLELLEKYPACEMKFSEFIALLPSIRPRYYSISSSPRVDEKQASITVSVVSGPAWSGYGEYKGIASNYLAELQEGDTITCFISTDQSEFTLPKDPETPLIMVGPGTGVAPFRGFVQARKQLKEQGQSLGEAHLYFGCRSPHEDYLYQEELENAQSEGIITLHTAFSRMPNQPKTYVQHVMEQDGKKLIELLDQGAHFYICGDGSQMAPAVEATLMKSYADVHQVSEADARLWLQQLEEKGRYAKDVWAG

SEQ ID NO: 549 - DNA, 3147 bp, synthetic construct
  misc_feature 1..3147: note = Variant of cytochrome P450
  source 1..3147: mol_type = other DNA
atgacaattaaggaaatgcctcagcctaagacgtttggagaacttaaaaatttaccgttattaaacacagataaaccggttcaagctttgatgcgtattgcggatgaattaggagaaatctttaaattcgaggcgcctggtagcgtaacgcgctttttatcaagtcagcgtctaattaaagaagcatgcgatgaatcacgctttgataaaaacttaagtcaaggccttaaatttgcacgtgattttcttggagacgggttatttacaagctggacgcatgaaccgaattggaaaaaagcgcataatatcttaggcccaagctttagtcagcgtgcaatgaaacgttatcatgcgatgatggtcgatatcgccgtgcagcttgttcaaaagtgggagcgtctaaatgcagatgagcatattgaagtatcggaagacatgacacgtttaacgctggatacaattggtctttgcggcttcaactatcgctttaacagcttttaccgagatcagcctcatccatttattgtgagtgttgtgcgtgcactggatgaagtaatgaacaagctgcagcgagcaaatccagacgacccagcttatgatgaaaacaagcgccagtgtcaagaagatatcaaggtgatgaacgactatgtcgataaaattattgcagatcgcaaagcaaggggtgaacaaagccatgatttattaacgcagatgctaaacggaaaagatccagaaacgggtgagccgcttgatgacgggaacattcgttatcaaattattacattcttaattgcgggacacgaaacaacaagtggtcttttatcatttgcgctgtatttcttagtgaaaaatccacatgtattacaaaaagtagcagaagaagcagcacgagttctagtagatcctgttccaagctacaaacaagtcaaacagcttaaatatgtcggcatggtcttaaacgaagcgctgcgcttatggccaactgctcctgcgttttccctatatgcaaaagaagatacggtgcttggaggagaatatcctttaaccaaaggcgacgaagtaatggttctgattcctcagcttcaccgtgataaaacaatttggggagacgatgtggaggagttccgtccagagcgttttgaaaatccaagtgcgattccgcagcatgcgtttaaaccgtttggaaacggtcagcgtgcgtgtatcggtcagcagttcgctcttcatgaagcaacgctggtacttggtatgatgctaaaacactttgactttgaagatcatacaaactacgagctcgttattaaagaactgttaacgttaaaacctgaaggctttgtggtaaaagcaaaatcgaaaggcattccgcttggcggtattccttcacctagcactgaacagtctgctaaaaaagtacgcaaaaaggcagaaaacgctcataatacgccgctgcttgtgctatacggttcaaatgcgggaacagctgaaggaacggcgcgtgatttagcagatattgcaatgagcaaaggatttgcaccgcaggtcgcaacgcttgattcacacgccggaaatcttccgcgcgaaggagctgtattaattgtaacggcgtcttataacggtcatccgcctgataacgcaaagcaatttgtcgactggttagaccaagcgtctgctgatgaagtaaaaggcgttcgctactccgtatttggatgcggcgataaaaactgggctgcgacgtatcaaaaagtgcctgcttttatcgatgaaacgcttgccgctaaaggggcagaaaacatcgctgaccgcggtgaagcagatgcaagcgacgactttgaaggcacatatgaagaatggagtgatcatatgtggagtgacgtagcagcctactttaacctcgacattgaaaacagtgaagataataaatctactctttcacttcaatttgtcgacagcgccgcggatatgccgcttgcgaaaatgcacggtgcgttttcaacgaacgtcgtagcaagcaaagaacttcaacagccaggcagtgcacgaagcacgcgacatcttgaaattgaacttccaaaagaagcttcttatcaagaaggagatcatttaggtgttattcctcgcaactatgaaggaatagtaaaccgtgtaacagcaaggttcggcctaagcgcatcacagcaaatccgtctggaagcagaagaagaaaaattagctcatttgccactcgctaaaacagtatccgtagaagagcttctgcaatacgtggagcttcaagatcctgttacgcgcacgcagcttcgcgcaatggctgctaaaacggtctgcccgccgcataaagtagagcttgaagccttgcttgaaaagcaagcctacaaagaacaagtgctggcaaaacgtttaacaatgcttgaactgcttgaaaaatacccggcgtgtgaaatgaaattcagcgaatttatcgcccttctgccaagcatacgcccgcgctattactcgatttcttcatcacctcgtgtcgatgaaaaacaagcaagcatcacggtcagcgttgtctcaggaccggcgtggagcggatatggagaatataaaggaattgcgtcgaactatcttgccgagctgcaagaaggagatacgattacgtgctttatttccacagatcagtcagaatttacgctgccaaaagaccctgaaacgccgcttatcatggtcggaccgggaacaggcgtcgcgccgtttagaggctttgtgcaggcgcgcaaacagctaaaagaacaaggacagtcacttggagaagcacatttatacttcggctgccgttcacctcatgaagactatctgtatcaagaagagcttgaaaacgcccaaagcgaaggcatcattacgcttcataccgctttttctcgcatgccaaatcagccgaaaacatacgttcagcacgtaatggaacaagacggcaagaaattgattgaacttcttgatcaaggagcgcacttctatatttgcggagacggaagccaaatggcacctgccgttgaagcaacgcttatgaaaagctatgctgacgttcaccaagtgagtgaagcagacgctcgcttatggctgcagcagctagaagaaaaaggccgatacgcaaaagacgtgtgggctggg

SEQ ID NO: 550 - protein, 1049 aa, synthetic construct
  REGION 1..1049: note = Variant of cytochrome P450
MTIKEMPQPKTFGELKNLPLLNTDKPVQALMRIADELGEIFKFEAPGSVTRFLSSQRLIKEACDESRFDKNLSQGLKFARDFLGDGLFTSWTHEPNWKKAHNILGPSFSQRAMKRYHAMMVDIAVQLVQKWERLNADEHIEVSEDMTRLTLDTIGLCGFNYRFNSFYRDQPHPFIVSVVRALDEVMNKLQRANPDDPAYDENKRQCQEDIKVMNDYVDKIIADRKARGEQSHDLLTQMLNGKDPETGEPLDDGNIRYQIITFLIAGHETTSGLLSFALYFLVKNPHVLQKVAEEAARVLVDPVPSYKQVKQLKYVGMVLNEALRLWPTAPAFSLYAKEDTVLGGEYPLTKGDEVMVLIPQLHRDKTIWGDDVEEFRPERFENPSAIPQHAFKPFGNGQRACIGQQFALHEATLVLGMMLKHFDFEDHTNYELVIKELLTLKPEGFVVKAKSKGIPLGGIPSPSTEQSAKKVRKKAENAHNTPLLVLYGSNAGTAEGTARDLADIAMSKGFAPQVATLDSHAGNLPREGAVLIVTASYNGHPPDNAKQFVDWLDQASADEVKGVRYSVFGCGDKNWAATYQKVPAFIDETLAAKGAENIADRGEADASDDFEGTYEEWSDHMWSDVAAYFNLDIENSEDNKSTLSLQFVDSAADMPLAKMHGAFSTNVVASKELQQPGSARSTRHLEIELPKEASYQEGDHLGVIPRNYEGIVNRVTARFGLSASQQIRLEAEEEKLAHLPLAKTVSVEELLQYVELQDPVTRTQLRAMAAKTVCPPHKVELEALLEKQAYKEQVLAKRLTMLELLEKYPACEMKFSEFIALLPSIRPRYYSISSSPRVDEKQASITVSVVSGPAWSGYGEYKGIASNYLAELQEGDTITCFISTDQSEFTLPKDPETPLIMVGPGTGVAPFRGFVQARKQLKEQGQSLGEAHLYFGCRSPHEDYLYQEELENAQSEGIITLHTAFSRMPNQPKTYVQHVMEQDGKKLIELLDQGAHFYICGDGSQMAPAVEATLMKSYADVHQVSEADARLWLQQLEEKGRYAKDVWAG

SEQ ID NO: 551 - DNA, 3147 bp, synthetic construct
  misc_feature 1..3147: note = Variant of cytochrome P450
  source 1..3147: mol_type = other DNA
atgacaattaaggaaatgcctcagcctaagacgtttggagaacttaaaaatttaccgttattaaacacagataaaccggttcaagctttgatgcgtattgcggatgaattaggagaaatctttaaattcgaggcgcctggtagcgtaacgcgctttttatcaagtcagcgtctaattaaagaagcatgcgatgaatcacgctttgataaaaacttaagtcaaggccttaaatttgcacgtgattttcttggagacgggttatttacaagctggacgcatgaaccgaattggaaaaaagcgcataatatcttaggcccaagctttagtcagcgtgcaatgaaacgttatcatgcgatgatggtcgatatcgccgtgcagcttgttcaaaagtgggagcgtctaaatgcagatgagcatattgaagtatcggaagacatgacacgtttaacgctggatacaattggtctttgcggcttcaactatcgctttaacagcttttaccgagatcagcctcatccatttattgtgagtgttgtgcgtgcactggatgaagtaatgaacaagctgcagcgagcaaatccagacgacccagcttatgatgaaaacaagcgccagtgtcaagaagatatcaaggtgatgaacgactatgtcgataaaattattgcagatcgcaaagcaaggggtgaacaaagccatgatttattaacgcagatgctaaacggaaaagatccagaaacgggtgagccgcttgatgacgggaacattcgttatcaaattattacattcttaattgcgggacacgaaacaacaagtggtcttttatcatttgcgctgtatttcttagtgaaaaatccacatgtattacaaaaagtagcagaagaagcagcacgagttctagtagatcctgttccaagctacaaacaagtcaaacagcttaaatatgtcggcatggtcttaaacgaagcgctgcgcttatggccaactgctcctgcgttttccctatatgcaaaagaagatacggtgcttggaggagaatatcctttaaccaaaggcgacgaagtaatggttctgattcctcagcttcaccgtgataaaacaatttggggagacgatgtggaggagttccgtccagagcgttttgaaaatccaagtgcgattccgcagcatgcgtttaaaccgtttggaaacggtcagcgtgcgtgtatcggtcagcagttcgctcttcatgaagcaacgctggtacttggtatgatgctaaaacactttgactttgaagatcatacaaactacgagctcgttattaaagaatcgttaacgttaaaacctgaaggctttgtggtaaaagcaaaatcgaaaggcattccgcttggcggtattccttcacctagcactgaacagtctgctaaaaaagtacgcaaaaaggcagaaaacgctcataatacgccgctgcttgtgctatacggttcaaatgcgggaacagctgaaggaacggcgcgtgatttagcagatattgcaatgagcaaaggatttgcaccgcaggtcgcaacgcttgattcacacgccggaaatcttccgcgcgaaggagctgtattaattgtaacggcgtcttataacggtcatccgcctgataacgcaaagcaatttgtcgactggttagaccaagcgtctgctgatgaagtaaaaggcgttcgctactccgtatttggatgcggcgataaaaactgggctgcgacgtatcaaaaagtgcctgcttttatcgatgaaacgcttgccgctaaaggggcagaaaacatcgctgaccgcggtgaagcagatgcaagcgacgactttgaaggcacatatgaagaatggagtgatcatatgtggagtgacgtagcagcctactttaacctcgacattgaaaacagtgaagataataaatctactctttcacttcaatttgtcgacagcgccgcggatatgccgcttgcgaaaatgcacggtgcgttttcaacgaacgtcgtagcaagcaaagaacttcaacagccaggcagtgcacgaagcacgcgacatcttgaaattgaacttccaaaagaagcttcttatcaagaaggagatcatttaggtgttattcctcgcaactatgaaggaatagtaaaccgtgtaacagcaaggttcggcctaagcgcatcacagcaaatccgtctggaagcagaagaagaaaaattagctcatttgccactcgctaaaacagtatccgtagaagagcttctgcaatacgtggagcttcaagatcctgttacgcgcacgcagcttcgcgcaatggctgctaaaacggtctgcccgccgcataaagtagagcttgaagccttgcttgaaaagcaagcctacaaagaacaagtgctggcaaaacgtttaacaatgcttgaactgcttgaaaaatacccggcgtgtgaaatgaaattcagcgaatttatcgcccttctgccaagcatacgcccgcgctattactcgatttcttcatcacctcgtgtcgatgaaaaacaagcaagcatcacggtcagcgttgtctcaggaccggcgtggagcggatatggagaatataaaggaattgcgtcgaactatcttgccgagctgcaagaaggagatacgattacgtgctttatttccacagatcagtcagaatttacgctgccaaaagaccctgaaacgccgcttatcatggtcggaccgggaacaggcgtcgcgccgtttagaggctttgtgcaggcgcgcaaacagctaaaagaacaaggacagtcacttggagaagcacatttatacttcggctgccgttcacctcatgaagactatctgtatcaagaagagcttgaaaacgcccaaagcgaaggcatcattacgcttcataccgctttttctcgcatgccaaatcagccgaaaacatacgttcagcacgtaatggaacaagacggcaagaaattgattgaacttcttgatcaaggagcgcacttctatatttgcggagacggaagccaaatggcacctgccgttgaagcaacgcttatgaaaagctatgctgacgttcaccaagtgagtgaagcagacgctcgcttatggctgcagcagctagaagaaaaaggccgatacgcaaaagacgtgtgggctggg

SEQ ID NO: 552 - protein, 1049 aa, synthetic construct
  REGION 1..1049: note = Variant of cytochrome P450
MTIKEMPQPKTFGELKNLPLLNTDKPVQALMRIADELGEIFKFEAPGSVTRFLSSQRLIKEACDESRFDKNLSQGLKFARDFLGDGLFTSWTHEPNWKKAHNILGPSFSQRAMKRYHAMMVDIAVQLVQKWERLNADEHIEVSEDMTRLTLDTIGLCGFNYRFNSFYRDQPHPFIVSVVRALDEVMNKLQRANPDDPAYDENKRQCQEDIKVMNDYVDKIIADRKARGEQSHDLLTQMLNGKDPETGEPLDDGNIRYQIITFLIAGHETTSGLLSFALYFLVKNPHVLQKVAEEAARVLVDPVPSYKQVKQLKYVGMVLNEALRLWPTAPAFSLYAKEDTVLGGEYPLTKGDEVMVLIPQLHRDKTIWGDDVEEFRPERFENPSAIPQHAFKPFGNGQRACIGQQFALHEATLVLGMMLKHFDFEDHTNYELVIKESLTLKPEGFVVKAKSKGIPLGGIPSPSTEQSAKKVRKKAENAHNTPLLVLYGSNAGTAEGTARDLADIAMSKGFAPQVATLDSHAGNLPREGAVLIVTASYNGHPPDNAKQFVDWLDQASADEVKGVRYSVFGCGDKNWAATYQKVPAFIDETLAAKGAENIADRGEADASDDFEGTYEEWSDHMWSDVAAYFNLDIENSEDNKSTLSLQFVDSAADMPLAKMHGAFSTNVVASKELQQPGSARSTRHLEIELPKEASYQEGDHLGVIPRNYEGIVNRVTARFGLSASQQIRLEAEEEKLAHLPLAKTVSVEELLQYVELQDPVTRTQLRAMAAKTVCPPHKVELEALLEKQAYKEQVLAKRLTMLELLEKYPACEMKFSEFIALLPSIRPRYYSISSSPRVDEKQASITVSVVSGPAWSGYGEYKGIASNYLAELQEGDTITCFISTDQSEFTLPKDPETPLIMVGPGTGVAPFRGFVQARKQLKEQGQSLGEAHLYFGCRSPHEDYLYQEELENAQSEGIITLHTAFSRMPNQPKTYVQHVMEQDGKKLIELLDQGAHFYICGDGSQMAPAVEATLMKSYADVHQVSEADARLWLQQLEEKGRYAKDVWAG

SEQ ID NO: 553 - DNA, 3147 bp, synthetic construct
  misc_feature 1..3147: note = Variant of cytochrome P450
  source 1..3147: mol_type = other DNA
atgacaattaaggaaatgcctcagcctaagacgtttggagaacttaaaaatttaccgttattaaacacagataaaccggttcaagctttgatgcgtattgcggatgaattaggagaaatctttaaattcgaggcgcctggtagcgtaacgcgctttttatcaagtcagcgtctaattaaagaagcatgcgatgaatcacgctttgataaaaacttaagtcaaggccttaaatttgcacgtgattttcttggagacgggttatttacaagctggacgcatgaaccgaattggaaaaaagcgcataatatcttaggcccaagctttagtcagcgtgcaatgaaacgttatcatgcgatgatggtcgatatcgccgtgcagcttgttcaaaagtgggagcgtctaaatgcagatgagcatattgaagtatcggaagacatgacacgtttaacgctggatacaattggtctttgcggcttcaactatcgctttaacagcttttaccgagatcagcctcatccatttattgtgagtgttgtgcgtctgctggatgaagtaatgaacaagctgcagcgagcaaatccagacgacccagcttatgatgaaaacaagcgccagtgtcaagaagatatcaaggtgatgaacgactatgtcgataaaattattgcagatcgcaaagcaaggggtgaacaaagccatgatttattaacgcagatgctaaacggaaaagatccagaaacgggtgagccgcttgatgacgggaacattcgttatcaaattattacattcttaattgcgggacacgaaacaacaagtggtcttttatcatttgcgctgtatttcttagtgaaaaatccacatgtattacaaaaagtagcagaagaagcagcacgagttctagtagatcctgttccaagctacaaacaagtcaaacagcttaaatatgtcggcatggtcttaaacgaagcgctgcgcttatggccaactgctcctgcgttttccctatatgcaaaagaagatacggtgcttggaggagaatatcctttaaccaaaggcgacgaagtaatggttctgattcctcagcttcaccgtgataaaacaatttggggagacgatgtggaggagttccgtccagagcgttttgaaaatccaagtgcgattccgcagcatgcgtttaaaccgtttggaaacggtcagcgtgcgtgtatcggtcagcagttcgctcttcatgaagcaacgctggtacttggtatgatgctaaaacactttgactttgaagatcatacaaactacgagctcgttattaaagaaaagttaacgttaaaacctgaaggctttgtggtaaaagcaaaatcgaaaggcattccgcttggcggtattccttcacctagcactgaacagtctgctaaaaaagtacgcaaaaaggcagaaaacgctcataatacgccgctgcttgtgctatacggttcaaatgcgggaacagctgaaggaacggcgcgtgatttagcagatattgcaatgagcaaaggatttgcaccgcaggtcgcaacgcttgattcacacgccggaaatcttccgcgcgaaggagctgtattaattgtaacggcgtcttataacggtcatccgcctgataacgcaaagcaatttgtcgactggttagaccaagcgtctgctgatgaagtaaaaggcgttcgctactccgtatttggatgcggcgataaaaactgggctgcgacgtatcaaaaagtgcctgcttttatcgatgaaacgcttgccgctaaaggggcagaaaacatcgctgaccgcggtgaagcagatgcaagcgacgactttgaaggcacatatgaagaatggagtgatcatatgtggagtgacgtagcagcctactttaacctcgacattgaaaacagtgaagataataaatctactctttcacttcaatttgtcgacagcgccgcggatatgccgcttgcgaaaatgcacggtgcgttttcaacgaacgtcgtagcaagcaaagaacttcaacagccaggcagtgcacgaagcacgcgacatcttgaaattgaacttccaaaagaagcttcttatcaagaaggagatcatttaggtgttattcctcgcaactatgaaggaatagtaaaccgtgtaacagcaaggttcggcctaagcgcatcacagcaaatccgtctggaagcagaagaagaaaaattagctcatttgccactcgctaaaacagtatccgtagaagagcttctgcaatacgtggagcttcaagatcctgttacgcgcacgcagcttcgcgcaatggctgctaaaacggtctgcccgccgcataaagtagagcttgaagccttgcttgaaaagcaagcctacaaagaacaagtgctggcaaaacgtttaacaatgcttgaactgcttgaaaaatacccggcgtgtgaaatgaaattcagcgaatttatcgcccttctgccaagcatacgcccgcgctattactcgatttcttcatcacctcgtgtcgatgaaaaacaagcaagcatcacggtcagcgttgtctcaggaccggcgtggagcggatatggagaatataaaggaattgcgtcgaactatcttgccgagctgcaagaaggagatacgattacgtgctttatttccacagatcagtcagaatttacgctgccaaaagaccctgaaacgccgcttatcatggtcggaccgggaacaggcgtcgcgccgtttagaggctttgtgcaggcgcgcaaacagctaaaagaacaaggacagtcacttggagaagcacatttatacttcggctgccgttcacctcatgaagactatctgtatcaagaagagcttgaaaacgcccaaagcgaaggcatcattacgcttcataccgctttttctcgcatgccaaatcagccgaaaacatacgttcagcacgtaatggaacaagacggcaagaaattgattgaacttcttgatcaaggagcgcacttctatatttgcggagacggaagccaaatggcacctgccgttgaagcaacgcttatgaaaagctatgctgacgttcaccaagtgagtgaagcagacgctcgcttatggctgcagcagctagaagaaaaaggccgatacgcaaaagacgtgtgggctggg

SEQ ID NO: 554 - protein, 1049 aa, synthetic construct
  REGION 1..1049: note = Variant of cytochrome P450
MTIKEMPQPKTFGELKNLPLLNTDKPVQALMRIADELGEIFKFEAPGSVTRFLSSQRLIKEACDESRFDKNLSQGLKFARDFLGDGLFTSWTHEPNWKKAHNILGPSFSQRAMKRYHAMMVDIAVQLVQKWERLNADEHIEVSEDMTRLTLDTIGLCGFNYRFNSFYRDQPHPFIVSVVRLLDEVMNKLQRANPDDPAYDENKRQCQEDIKVMNDYVDKIIADRKARGEQSHDLLTQMLNGKDPETGEPLDDGNIRYQIITFLIAGHETTSGLLSFALYFLVKNPHVLQKVAEEAARVLVDPVPSYKQVKQLKYVGMVLNEALRLWPTAPAFSLYAKEDTVLGGEYPLTKGDEVMVLIPQLHRDKTIWGDDVEEFRPERFENPSAIPQHAFKPFGNGQRACIGQQFALHEATLVLGMMLKHFDFEDHTNYELVIKEKLTLKPEGFVVKAKSKGIPLGGIPSPSTEQSAKKVRKKAENAHNTPLLVLYGSNAGTAEGTARDLADIAMSKGFAPQVATLDSHAGNLPREGAVLIVTASYNGHPPDNAKQFVDWLDQASADEVKGVRYSVFGCGDKNWAATYQKVPAFIDETLAAKGAENIADRGEADASDDFEGTYEEWSDHMWSDVAAYFNLDIENSEDNKSTLSLQFVDSAADMPLAKMHGAFSTNVVASKELQQPGSARSTRHLEIELPKEASYQEGDHLGVIPRNYEGIVNRVTARFGLSASQQIRLEAEEEKLAHLPLAKTVSVEELLQYVELQDPVTRTQLRAMAAKTVCPPHKVELEALLEKQAYKEQVLAKRLTMLELLEKYPACEMKFSEFIALLPSIRPRYYSISSSPRVDEKQASITVSVVSGPAWSGYGEYKGIASNYLAELQEGDTITCFISTDQSEFTLPKDPETPLIMVGPGTGVAPFRGFVQARKQLKEQGQSLGEAHLYFGCRSPHEDYLYQEELENAQSEGIITLHTAFSRMPNQPKTYVQHVMEQDGKKLIELLDQGAHFYICGDGSQMAPAVEATLMKSYADVHQVSEADARLWLQQLEEKGRYAKDVWAG

SEQ ID NO: 555 - DNA, 3147 bp, synthetic construct
  misc_feature 1..3147: note = Variant of cytochrome P450
  source 1..3147: mol_type = other DNA
atgacaattaaggaaatgcctcagcctaagacgtttggagaacttaaaaatttaccgttattaaacacagataaaccggttcaagctttgatgcgtattgcggatgaattaggagaaatctttaaattcgaggcgcctggtagcgtaacgcgctttttatcaagtcagcgtctaattaaagaagcatgcgatgaatcacgctttgataaaaacttaagtcaaggccttaaatttgcacgtgattttcttggagacgggttatttacaagctggacgcatgaaccgaattggaaaaaagcgcataatatcttaggcccaagctttagtcagcgtgcaatgaaacgttatcatgcgatgatggtcgatatcgccgtgcagcttgttcaaaagtgggagcgtctaaatgcagatgagcatattgaagtatcggaagacatgacacgtttaacgctggatacaattggtctttgcggcttcaactatcgctttaacagcttttaccgagatcagcctcatccatttattgtgagtgttgtgcgtgcactggatgaagtaatgaacaagctgcagcgagcaaatccagacgacccagcttatgatgaaaacaagcgccagtgtcaagaagatatcaaggtgatgaacgactatgtcgataaaattattgcagatcgcaaagcaaggggtgaacaaagccatgatttattaacgcagatgctaaacggaaaagatccagaaacgggtgagccgcttgatgacgggaacattcgttatcaaattattacattcttaattgcgggacacgaaacaacaagtggtcttttatcatttgcgctgtatttcttagtgaaaaatccacatgtattacaaaaagtagcagaagaagcagcacgagttctagtagatcctgttccaagctacaaacaagtcaaacagcttaaatatgtcggcatggtcttaaacgaagcgctgcgcttatggccaactgctcctgcgttttccctatatgcaaaagaagatacggtgcttggaggagaatatcctttaaccaaaggcgacgaagtaatggttctgattcctcagcttcaccgtgataaaacaatttggggagacgatgtggaggagttccgtccagagcgttttgaaaatccaagtgcgattccgcagcatgcgtttaaaccgtttggaaacggtcagcgtgcgtgtatcggtcagcagttcgctcttcatgaagcaacgctggtacttggtatgatgctaaaacactttgactttgaagatcatacaaactacgagctcgttattaaagaagtgttaacgttaaaacctgaaggctttgtggtaaaagcaaaatcgaaaggcattccgcttggcggtattccttcacctagcactgaacagtctgctaaaaaagtacgcaaaaaggcagaaaacgctcataatacgccgctgcttgtgctatacggttcaaatgcgggaacagctgaaggaacggcgcgtgatttagcagatattgcaatgagcaaaggatttgcaccgcaggtcgcaacgcttgattcacacgccggaaatcttccgcgcgaaggagctgtattaattgtaacggcgtcttataacggtcatccgcctgataacgcaaagcaatttgtcgactggttagaccaagcgtctgctgatgaagtaaaaggcgttcgctactccgtatttggatgcggcgataaaaactgggctgcgacgtatcaaaaagtgcctgcttttatcgatgaaacgcttgccgctaaaggggcagaaaacatcgctgaccgcggtgaagcagatgcaagcgacgactttgaaggcacatatgaagaatggagtgatcatatgtggagtgacgtagcagcctactttaacctcgacattgaaaacagtgaagataataaatctactctttcacttcaatttgtcgacagcgccgcggatatgccgcttgcgaaaatgcacggtgcgttttcaacgaacgtcgtagcaagcaaagaacttcaacagccaggcagtgcacgaagcacgcgacatcttgaaattgaacttccaaaagaagcttcttatcaagaaggagatcatttaggtgttattcctcgcaactatgaaggaatagtaaaccgtgtaacagcaaggttcggcctaagcgcatcacagcaaatccgtctggaagcagaagaagaaaaattagctcatttgccactcgctaaaacagtatccgtagaagagcttctgcaatacgtggagcttcaagatcctgttacgcgcacgcagcttcgcgcaatggctgctaaaacggtctgcccgccgcataaagtagagcttgaagccttgcttgaaaagcaagcctacaaagaacaagtgctggcaaaacgtttaacaatgcttgaactgcttgaaaaatacccggcgtgtgaaatgaaattcagcgaatttatcgcccttctgccaagcatacgcccgcgctattactcgatttcttcatcacctcgtgtcgatgaaaaacaagcaagcatcacggtcagcgttgtctcaggaccggcgtggagcggatatggagaatataaaggaattgcgtcgaactatcttgccgagctgcaagaaggagatacgattacgtgctttatttccacagatcagtcagaatttacgctgccaaaagaccctgaaacgccgcttatcatggtcggaccgggaacaggcgtcgcgccgtttagaggctttgtgcaggcgcgcaaacagctaaaagaacaaggacagtcacttggagaagcacatttatacttcggctgccgttcacctcatgaagactatctgtatcaagaagagcttgaaaacgcccaaagcgaaggcatcattacgcttcataccgctttttctcgcatgccaaatcagccgaaaacatacgttcagcacgtaatggaacaagacggcaagaaattgattgaacttcttgatcaaggagcgcacttctatatttgcggagacggaagccaaatggcacctgccgttgaagcaacgcttatgaaaagctatgctgacgttcaccaagtgagtgaagcagacgctcgcttatggctgcagcagctagaagaaaaaggccgatacgcaaaagacgtgtgggctggg

SEQ ID NO: 556 - protein, 1049 aa, synthetic construct
  REGION 1..1049: note = Variant of cytochrome P450
MTIKEMPQPKTFGELKNLPLLNTDKPVQALMRIADELGEIFKFEAPGSVTRFLSSQRLIKEACDESRFDKNLSQGLKFARDFLGDGLFTSWTHEPNWKKAHNILGPSFSQRAMKRYHAMMVDIAVQLVQKWERLNADEHIEVSEDMTRLTLDTIGLCGFNYRFNSFYRDQPHPFIVSVVRALDEVMNKLQRANPDDPAYDENKRQCQEDIKVMNDYVDKIIADRKARGEQSHDLLTQMLNGKDPETGEPLDDGNIRYQIITFLIAGHETTSGLLSFALYFLVKNPHVLQKVAEEAARVLVDPVPSYKQVKQLKYVGMVLNEALRLWPTAPAFSLYAKEDTVLGGEYPLTKGDEVMVLIPQLHRDKTIWGDDVEEFRPERFENPSAIPQHAFKPFGNGQRACIGQQFALHEATLVLGMMLKHFDFEDHTNYELVIKEVLTLKPEGFVVKAKSKGIPLGGIPSPSTEQSAKKVRKKAENAHNTPLLVLYGSNAGTAEGTARDLADIAMSKGFAPQVATLDSHAGNLPREGAVLIVTASYNGHPPDNAKQFVDWLDQASADEVKGVRYSVFGCGDKNWAATYQKVPAFIDETLAAKGAENIADRGEADASDDFEGTYEEWSDHMWSDVAAYFNLDIENSEDNKSTLSLQFVDSAADMPLAKMHGAFSTNVVASKELQQPGSARSTRHLEIELPKEASYQEGDHLGVIPRNYEGIVNRVTARFGLSASQQIRLEAEEEKLAHLPLAKTVSVEELLQYVELQDPVTRTQLRAMAAKTVCPPHKVELEALLEKQAYKEQVLAKRLTMLELLEKYPACEMKFSEFIALLPSIRPRYYSISSSPRVDEKQASITVSVVSGPAWSGYGEYKGIASNYLAELQEGDTITCFISTDQSEFTLPKDPETPLIMVGPGTGVAPFRGFVQARKQLKEQGQSLGEAHLYFGCRSPHEDYLYQEELENAQSEGIITLHTAFSRMPNQPKTYVQHVMEQDGKKLIELLDQGAHFYICGDGSQMAPAVEATLMKSYADVHQVSEADARLWLQQLEEKGRYAKDVWAG

SEQ ID NO: 557 - DNA, 3147 bp, synthetic construct
  misc_feature 1..3147: note = Variant of cytochrome P450
  source 1..3147: mol_type = other DNA
atgacaattaaggaaatgcctcagcctaagacgtttggagaacttaaaaatttaccgttattaaacacagataaaccggttcaagctttgatgcgtattgcggatgaattaggagaaatctttaaattcgaggcgcctggtagcgtaacgcgctttttatcaagtcagcgtctaattaaagaagcatgcgatgaacgtcgctttgataaaaacttaagtcaaggccttaaatttgcacgtgattttcttggagacgggttatttacaagctggacgcatgaaccgaattataaaaaagcgcataatatcttaggcccaagctttagtcagcgtgcaatgaaacgttatcatgcgatgatggtcgatatcgccgtgcagcttgttcaaaagtgggagcgtctaaatgcagatgagcatattgaagtatcggaagacatgacacgtttaacgctggatacaattggtctttgcggcttcaactatcgctttaacagcttttaccgagatcagcctcatccatttattgtgagtgttgagggtgcactggatgaagtaatgaacaagctgcagcgagcaaatccagacgacccagcttatgatgaaaacaagcgccagtgtcaagaagacatcaaggtgatgaacgactatgtcgataaaattattgcagatcgcaaagcaaggggtgaacaaagccatgatttattaacgcagatgctaaacggaaaagatccagaaacgggtgagccgcttgatgacgggaacattcgttatcaaattattacattcttaattgcgggacacgaaacaacaagtggtcttttatcatttgcgctgtatttcttagtgaaaaatccacatgtattacaaaaagtagcagaagaagcagcacgagttctagtagatcctgttccaagctacaaacaagtcaaacagcttaaatatgtcggcatggtcttaaacgaagcgctgcgcttatggccaactgctcctgcgttttccctatatgcaaaagaagatacggtgcttggaggagaatatcctttaaccaaaggcgacgaagtaatggttctgattcctcagcttcaccgtgataaaacaatttggggagacgatgtggaggagttccgtccagagcgttttgaaaatccaagtgcgattccgcagcatgcgtttaaaccgtttggaaacggtcagcgtgcgtgtatcggtcagcagttcgctcttcatgaagcaacgctggtacttggtatgatgctaaaacactttgactttgaagatcatacaaactacgagctcgttattaaagaaatgttaacgttaaaacctgaaggctttgtggtaaaagcaaaatcgaaaggcattccgcttggcggtattccttcacctagcactgaacagtctgctaaaaaagtacgcaaaaaggcagaaaacgctcataatacgccgctgcttgtgctatacggttcaaatgcgggaacagctgaaggaacggcgcgtgatttagcagatattgcaatgagcaaaggatttgcaccgcaggtcgcaacgcttgattcacacgccggaaatcttccgcgcgaaggagctgtattaattgtaacggcgtcttataacggtcatccgcctgataacgcaaagcaatttgtcgactggttagaccaagcgtctgctgatgaagtaaaaggcgttcgctactccgtatttggatgcggcgataaaaactgggctgcgacgtatcaaaaagtgcctgcttttatcgatgaaacgcttgccgctaaaggggcagaaaacatcgctgaccgcggtgaagcagatgcaagcgacgactttgaaggcgcgtatgaagaatggagtgatcatatgtggagtgacgtagcagcctactttaacctcgacattgaaaacagtgaagataataaatctactctttcacttcaatttgtcgacagcgccgcggatatgccgcttgcgaaaatgcacggtgcgttttcaacgaacgtcgtagcaagcaaagaacttcaacagccaggcagtgcacgaagcacgcgacatcttgaaattgaacttccaaaagaagcttcttatcaagaaggagatcatttaggtgttattcctcgcaactatgaaggaatagtaaaccgtgtaacagcaaggttcggcctaagcgcatcacagcaaatccgtctggaagcagaagaagaaaaattagctcatttgccactcgctaaaacagtatccgtagaagagcttctgcaatacgtggagcttcaagatcctgttacgcgcacgcagcttcgcgcaatggctgctaaaacggtctgcccgccgcataaagtagagcttgaagccttgcttgaaaagcaagcctacaaagaacaagtgctggcaaaacgtttaacaatgcttgaactgcttgaaaaatacccggcgtgtgaaatgaaattcagcgaatttatcgcccttctgccaagcatacgcccgcgctattactcgatttcttcatcacctcgtgtcgatgaaaaacaagcaagcatcacggtcagcgttgtctcaggaccggcgtggagcggatatggagaatataaaggaattgcgtcgaactatcttgccgagctgcaagaaggagatacgattacgtgctttatttccacagatcagtcagaatttacgctgccaaaagaccctgaaacgccgcttatcatggtcggaccgggaacaggcgtcgcgccgtttagaggctttgtgcaggcgcgcaaacagctaaaagaacaaggacagtcacttggagaagcacatttatacttcggctgccgttcacctcatgaagactatctgtatcaagaagagcttgaaaacgcccaaagcgaaggcatcattacgcttcataccgctttttctcgcatgccaaatcagccgaaaacatacgttcagcacgtaatggaacaagacggcaagaaattgattgaacttcttgatcaaggagcgcacttctatatttgcggagacggaagccaaatggcacctgccgttgaagcaacgcttatgaaaagctatgctgacgttcaccaagtgagtgaagcagacgctcgcttatggctgcagcagctagaagaaaaaggccgatacgcaaaagacgtgtgggctggg

SEQ ID NO: 558 - protein, 1049 aa, synthetic construct
  REGION 1..1049: note = Variant of cytochrome P450
MTIKEMPQPKTFGELKNLPLLNTDKPVQALMRIADELGEIFKFEAPGSVTRFLSSQRLIKEACDERRFDKNLSQGLKFARDFLGDGLFTSWTHEPNYKKAHNILGPSFSQRAMKRYHAMMVDIAVQLVQKWERLNADEHIEVSEDMTRLTLDTIGLCGFNYRFNSFYRDQPHPFIVSVEGALDEVMNKLQRANPDDPAYDENKRQCQEDIKVMNDYVDKIIADRKARGEQSHDLLTQMLNGKDPETGEPLDDGNIRYQIITFLIAGHETTSGLLSFALYFLVKNPHVLQKVAEEAARVLVDPVPSYKQVKQLKYVGMVLNEALRLWPTAPAFSLYAKEDTVLGGEYPLTKGDEVMVLIPQLHRDKTIWGDDVEEFRPERFENPSAIPQHAFKPFGNGQRACIGQQFALHEATLVLGMMLKHFDFEDHTNYELVIKEMLTLKPEGFVVKAKSKGIPLGGIPSPSTEQSAKKVRKKAENAHNTPLLVLYGSNAGTAEGTARDLADIAMSKGFAPQVATLDSHAGNLPREGAVLIVTASYNGHPPDNAKQFVDWLDQASADEVKGVRYSVFGCGDKNWAATYQKVPAFIDETLAAKGAENIADRGEADASDDFEGAYEEWSDHMWSDVAAYFNLDIENSEDNKSTLSLQFVDSAADMPLAKMHGAFSTNVVASKELQQPGSARSTRHLEIELPKEASYQEGDHLGVIPRNYEGIVNRVTARFGLSASQQIRLEAEEEKLAHLPLAKTVSVEELLQYVELQDPVTRTQLRAMAAKTVCPPHKVELEALLEKQAYKEQVLAKRLTMLELLEKYPACEMKFSEFIALLPSIRPRYYSISSSPRVDEKQASITVSVVSGPAWSGYGEYKGIASNYLAELQEGDTITCFISTDQSEFTLPKDPETPLIMVGPGTGVAPFRGFVQARKQLKEQGQSLGEAHLYFGCRSPHEDYLYQEELENAQSEGIITLHTAFSRMPNQPKTYVQHVMEQDGKKLIELLDQGAHFYICGDGSQMAPAVEATLMKSYADVHQVSEADARLWLQQLEEKGRYAKDVWAG

SEQ ID NO: 559 - DNA, 3147 bp, synthetic construct
  misc_feature 1..3147: note = Variant of cytochrome P450
  source 1..3147: mol_type = other DNA
atgacaattaaggaaatgcctcagcctaagacgtttggagaacttaaaaatttaccgttattaaacacagataaaccggttcaagctttgatgcgtattgcggatgaattaggagaaatctttaaattcgaggcgcctggtagcgtaacgcgctttttatcaagtcagcgtctaattaaagaagcatgcgatgaatcacgctttgataaaaacttaagtcaaggccttaaatttgcacgtgattttcttggagacgggttatttacaagctggacgcatgaaccgaattggaaaaaagcgcataatatcttaggcccaagctttagtcagcgtgcaatgaaacgttatcatgcgatgatggtcgatatcgccgtgcagcttgttcaaaagtgggagcgtctaaatgcagatgagcatattgaagtatcggaagacatgacacgtttaacgctggatacaattggtctttgcggcttcaactatcgctttaacagcttttaccgagatcagcctcatccatttattgtgagtgttgagcgtgcactggatgaagtaatgaacaagctgcagcgagcaaatccagacgacccagcttatgatgaaaacaagcgccagtgtcaagaagccatcaaggtgatgaacgactatgtcgataaaattattgcagatcgcaaagcaaggggtgaacaaagccatgatttattaacgcagatgctaaacggaaaagatccagaaacgggtgagccgcttgatgacgggaacattcgttatcaaattattacattcttaattgcgggacacgaaacaacaagtggtcttttatcatttgcgctgtatttcttagtgaaaaatccacatgtattacaaaaagtagcagaagaagcagcacgagttctagtagatcctgttccaagctacaaacaagtcaaacagcttaaatatgtcggcatggtcttaaacgaagcgctgcgcttatggccaactgctcctgcgttttccctatatgcaaaagaagatacggtgcttggaggagaatatcctttaaccaaaggcgacgaagtaatggttctgattcctcagcttcaccgtgataaaacaatttggggagacgatgtggaggagttccgtccagagcgttttgaaaatccaagtgcgattccgcagcatgcgtttaaaccgtttggaaacggtcagcgtgcgtgtatcggttggcagttcgctcttcatgaagcaacgctggtacttggtatgatgctaaaacactttgactttgaagatcatacaaactacgagctcgttattaaagaaaagttaacgttaaaacctgaaggctttgtggtaaaagcaaaatcgaaaggcattccgcttggcctgattccttcacctagcactgaacagtctgctaaaaaagtacgcaaaaaggcagaaaacgctcataatacgccgctgcttgtgctatacggttcaaatgcgggaacagctgaaggaacggcgcgtgatttagcagatattgcaatgagcaaaggatttgcaccgcaggtcgcaacgcttgattcacacgccggaaatcttccgcgcgaaggagctgtattaattgtaacggcgtcttataacggtcatccgcctgataacgcaaagcaatttgtcgactggttagaccaagcgtctgctgatgaagtaaaaggcgttcgctactccgtatttggatgcggcgataaaaactgggctgcgacgtatcaaaaagtgcctgcttttatcgatgaaacgcttgccgctaaaggggcagaaaacatcgctgaccgcggtgaagcagatgcaagcgacgactttgaaggcgcgtatgaagaatggagtgatcatatgtggagtgacgtagcagcctactttaacctcgacattgaaaacagtgaagataataaatctactctttcacttcaatttgtcgacagcgccgcggatatgccgcttgcgaaaatgcacggtgcgttttcaacgaacgtcgtagcaagcaaagaacttcaacagccaggcagtgcacgaagcacgcgacatcttgaaattgaacttccaaaagaagcttcttatcaagaaggagatcatttaggtgttattcctcgcaactatgaaggaatagtaaaccgtgtaacagcaaggttcggcctaagcgcatcacagcaaatccgtctggaagcagaagaagaaaaattagctcatttgccactcgctaaaacagtatccgtagaagagcttctgcaatacgtggagcttcaagatcctgttacgcgcacgcagcttcgcgcaatggctgctaaaacggtctgcccgccgcataaagtagagcttgaagccttgcttgaaaagcaagcctacaaagaacaagtgctggcaaaacgtttaacaatgcttgaactgcttgaaaaatacccggcgtgtgaaatgaaattcagcgaatttatcgcccttctgccaagcatacgcccgcgctattactcgatttcttcatcacctcgtgtcgatgaaaaacaagcaagcatcacggtcagcgttgtctcaggaccggcgtggagcggatatggagaatataaaggaattgcgtcgaactatcttgccgagctgcaagaaggagatacgattacgtgctttatttccacagatcagtcagaatttacgctgccaaaagaccctgaaacgccgcttatcatggtcggaccgggaacaggcgtcgcgccgtttagaggctttgtgcaggcgcgcaaacagctaaaagaacaaggacagtcacttggagaagcacatttatacttcggctgccgttcacctcatgaagactatctgtatcaagaagagcttgaaaacgcccaaagcgaaggcatcattacgcttcataccgctttttctcgcatgccaaatcagccgaaaacatacgttcagcacgtaatggaacaagacggcaagaaattgattgaacttcttgatcaaggagcgcacttctatatttgcggagacggaagccaaatggcacctgccgttgaagcaacgcttatgaaaagctatgctgacgttcaccaagtgagtgaagcagacgctcgcttatggctgcagcagctagaagaaaaaggccgatacgcaaaagacgtgtgggctggg

SEQ ID NO: 560 - protein, 1049 aa, synthetic construct
  REGION 1..1049: note = Variant of cytochrome P450
MTIKEMPQPKTFGELKNLPLLNTDKPVQALMRIADELGEIFKFEAPGSVTRFLSSQRLIKEACDESRFDKNLSQGLKFARDFLGDGLFTSWTHEPNWKKAHNILGPSFSQRAMKRYHAMMVDIAVQLVQKWERLNADEHIEVSEDMTRLTLDTIGLCGFNYRFNSFYRDQPHPFIVSVERALDEVMNKLQRANPDDPAYDENKRQCQEAIKVMNDYVDKIIADRKARGEQSHDLLTQMLNGKDPETGEPLDDGNIRYQIITFLIAGHETTSGLLSFALYFLVKNPHVLQKVAEEAARVLVDPVPSYKQVKQLKYVGMVLNEALRLWPTAPAFSLYAKEDTVLGGEYPLTKGDEVMVLIPQLHRDKTIWGDDVEEFRPERFENPSAIPQHAFKPFGNGQRACIGWQFALHEATLVLGMMLKHFDFEDHTNYELVIKEKLTLKPEGFVVKAKSKGIPLGLIPSPSTEQSAKKVRKKAENAHNTPLLVLYGSNAGTAEGTARDLADIAMSKGFAPQVATLDSHAGNLPREGAVLIVTASYNGHPPDNAKQFVDWLDQASADEVKGVRYSVFGCGDKNWAATYQKVPAFIDETLAAKGAENIADRGEADASDDFEGAYEEWSDHMWSDVAAYFNLDIENSEDNKSTLSLQFVDSAADMPLAKMHGAFSTNVVASKELQQPGSARSTRHLEIELPKEASYQEGDHLGVIPRNYEGIVNRVTARFGLSASQQIRLEAEEEKLAHLPLAKTVSVEELLQYVELQDPVTRTQLRAMAAKTVCPPHKVELEALLEKQAYKEQVLAKRLTMLELLEKYPACEMKFSEFIALLPSIRPRYYSISSSPRVDEKQASITVSVVSGPAWSGYGEYKGIASNYLAELQEGDTITCFISTDQSEFTLPKDPETPLIMVGPGTGVAPFRGFVQARKQLKEQGQSLGEAHLYFGCRSPHEDYLYQEELENAQSEGIITLHTAFSRMPNQPKTYVQHVMEQDGKKLIELLDQGAHFYICGDGSQMAPAVEATLMKSYADVHQVSEADARLWLQQLEEKGRYAKDVWAG

SEQ ID NO: 561 - DNA, 3147 bp, synthetic construct
  misc_feature 1..3147: note = Variant of cytochrome P450
  source 1..3147: mol_type = other DNA
atgacaattaaggaaatgcctcagcctaagacgtttggagaacttaaaaatttaccgttattaaacacagataaaccggttcaagctttgatgcgtattgcggatgaattaggagaaatctttaaattcgaggcgcctggtagcgtaacgcgctttttatcaagtcagcgtctaattaaagaagcatgcgatgaatcacgctttgataaaaacttaagtcaaggccttaaatttgcacgtgattttcttggagacgggttatttacaagctggacgcatgaaccgaattggaaaaaagcgcataatatcttaggcccaagctttagtcagcgtgcaatgaatcgttatcatgcgatgatggtcgatatcgccgtgcagcttgttcaaaagtgggagcgtctaaatgcagatgagcatattgaagtatcggaagacatgacacgtttaacgctggatacaattggtctttgcggcttcaactatcgctttaacagcttttaccgagatcagcctcatccatttattgtgagtgttgagcgtgcactggatgaagtaatgaacaagctgcagcgagcaaatccagacgacccagcttatgatgaaaacaagcgccagtgtcaagaagatatcaaggtgatgaacgactatgtcgataaaattattgcagatcgcaaagcaaggggtgaacaaagccatgatttattaacgcagatgctaaacggaaaagatccagaaacgggtgagccgcttgatgacgggaacattcgttatcaaattattacattcttaattgcgggacacgaaacaacaagtggtcttttatcatttgcgctgtatttcttagtgaaaaatccacatgtattacaaaaagtagcagaagaagcagcacgagttctagtagatcctgttccaagctacaaacaagtcaaacagcttaaatatgtcggcatggtcttaaacgaagcgctgcgcttatggccaactgctcctgcgttttccctatatgcaaaagaagatacggtgcttggaggagaatatcctttaaccaaaggcgacgaagtaatggttctgattcctcagcttcaccgtgataaaacaatttggggagacgatgtggaggagttccgtccagagcgttttgaaaatccaagtgcgattccgcagcatgcgtttaaaccgtttggaaacggtcagcgtgcgtgtatcggtcagcagttcgctcttcatgaagcaacgctggtacttggtatgatgctaaaacactttgactttgaagatcatacaaactacgagctcgttattaaagaaaagttaacgttaaaacctgaaggctttgtggtaaaagcaaaatcgaaaggcattccgcttggcggtattccttcacctagcactgaacagtctgctaaaaaagtacgcaaaaaggcagaaaacgctcataatacgccgctgcttgtgctatacggttcaaatgcgggaacagctgaaggaacggcgcgtgatttagcagatattgcaatgagcaaaggatttgcaccgcaggtcgcaacgcttgattcacacgccggaaatcttccgcgcgaaggagctgtattaattgtaacggcgtcttataacggtcatccgcctgataacgcaaagcaatttgtcgactggttagaccaagcgtctgctgatgaagtaaaaggcgttcgctactccgtatttggatgcggcgataaaaactgggctgcgacgtatcaaaaagtgcctgcttttatcgatgaaacgcttgccgctaaaggggcagaaaacatcgctgaccgcggtgaagcagatgcaagcgacgactttgaaggcacatatgaagaatggagtgatcatatgtggagtgacgtagcagcctactttaacctcgacattgaaaacagtgaagataataaatctactctttcacttcaatttgtcgacagcgccgcggatatgccgcttgcgaaaatgcacggtgcgttttcaacgaacgtcgtagcaagcaaagaacttcaacagccaggcagtgcacgaagcacgcgacatcttgaaattgaacttccaaaagaagcttcttatcaagaaggagatcatttaggtgttattcctcgcaactatgaaggaatagtaaaccgtgtaacagcaaggttcggcctaagcgcatcacagcaaatccgtctggaagcagaagaagaaaaattagctcatttgccactcgctaaaacagtatccgtagaagagcttctgcaatacgtggagcttcaagatcctgttacgcgcacgcagcttcgcgcaatggctgctaaaacggtctgcccgccgcataaagtagagcttgaagccttgcttgaaaagcaagcctacaaagaacaagtgctggcaaaacgtttaacaatgcttgaactgcttgaaaaatacccggcgtgtgaaatgaaattcagcgaatttatcgcccttctgccaagcatacgcccgcgctattactcgatttcttcatcacctcgtgtcgatgaaaaacaagcaagcatcacggtcagcgttgtctcaggaccggcgtggagcggatatggagaatataaaggaattgcgtcgaactatcttgccgagctgcaagaaggagatacgattacgtgctttatttccacagatcagtcagaatttacgctgccaaaagaccctgaaacgccgcttatcatggtcggaccgggaacaggcgtcgcgccgtttagaggctttgtgcaggcgcgcaaacagctaaaagaacaaggacagtcacttggagaagcacatttatacttcggctgccgttcacctcatgaagactatctgtatcaagaagagcttgaaaacgcccaaagcgaaggcatcattacgcttcataccgctttttctcgcatgccaaatcagccgaaaacatacgttcagcacgtaatggaacaagacggcaagaaattgattgaacttcttgatcaaggagcgcacttctatatttgcggagacggaagccaaatggcacctgccgttgaagcaacgcttatgaaaagctatgctgacgttcaccaagtgagtgaagcagacgctcgcttatggctgcagcagctagaagaaaaaggccgatacgcaaaagacgtgtgggctggg

SEQ ID NO: 562 - protein, 1049 aa, synthetic construct
  REGION 1..1049: note = Variant of cytochrome P450
MTIKEMPQPKTFGELKNLPLLNTDKPVQALMRIADELGEIFKFEAPGSVTRFLSSQRLIKEACDESRFDKNLSQGLKFARDFLGDGLFTSWTHEPNWKKAHNILGPSFSQRAMNRYHAMMVDIAVQLVQKWERLNADEHIEVSEDMTRLTLDTIGLCGFNYRFNSFYRDQPHPFIVSVERALDEVMNKLQRANPDDPAYDENKRQCQEDIKVMNDYVDKIIADRKARGEQSHDLLTQMLNGKDPETGEPLDDGNIRYQIITFLIAGHETTSGLLSFALYFLVKNPHVLQKVAEEAARVLVDPVPSYKQVKQLKYVGMVLNEALRLWPTAPAFSLYAKEDTVLGGEYPLTKGDEVMVLIPQLHRDKTIWGDDVEEFRPERFENPSAIPQHAFKPFGNGQRACIGQQFALHEATLVLGMMLKHFDFEDHTNYELVIKEKLTLKPEGFVVKAKSKGIPLGGIPSPSTEQSAKKVRKKAENAHNTPLLVLYGSNAGTAEGTARDLADIAMSKGFAPQVATLDSHAGNLPREGAVLIVTASYNGHPPDNAKQFVDWLDQASADEVKGVRYSVFGCGDKNWAATYQKVPAFIDETLAAKGAENIADRGEADASDDFEGTYEEWSDHMWSDVAAYFNLDIENSEDNKSTLSLQFVDSAADMPLAKMHGAFSTNVVASKELQQPGSARSTRHLEIELPKEASYQEGDHLGVIPRNYEGIVNRVTARFGLSASQQIRLEAEEEKLAHLPLAKTVSVEELLQYVELQDPVTRTQLRAMAAKTVCPPHKVELEALLEKQAYKEQVLAKRLTMLELLEKYPACEMKFSEFIALLPSIRPRYYSISSSPRVDEKQASITVSVVSGPAWSGYGEYKGIASNYLAELQEGDTITCFISTDQSEFTLPKDPETPLIMVGPGTGVAPFRGFVQARKQLKEQGQSLGEAHLYFGCRSPHEDYLYQEELENAQSEGIITLHTAFSRMPNQPKTYVQHVMEQDGKKLIELLDQGAHFYICGDGSQMAPAVEATLMKSYADVHQVSEADARLWLQQLEEKGRYAKDVWAG

SEQ ID NO: 563 - DNA, 3147 bp, synthetic construct
  misc_feature 1..3147: note = Variant of cytochrome P450
  source 1..3147: mol_type = other DNA
atgacaattaaggaaatgcctcagcctaagacgtttggagaacttaaaaatttaccgttattaaacacagataaaccggttcaagctttgatgcgtattgcggatgaattaggagaaatctttaaattcgaggcgcctggtagcgtaacgcgctttttatcaagtcagcgtctaattaaagaagcatgcgatgaacgtcgctttgataaaaacttaagtcaaggccttaaatttgcacgtgattttcttggagacgggttatttacaagctggacgcatgaaccgaattggaaaaaagcgcataatatcttaggcccaagctttagtcagcgtgcaatgaaacgttatcatgcgatgatggtcgatatcgccgtgcagcttgttcaaaagtgggagcgtctaaatgcagatgagcatattgaagtatcggaagacatgacacgtttaacgctggatacaattggtctttgcggcttcaactatcgctttaacagcttttaccgagatcagcctcatccatttattgtgagtgttgagcgtgcactggatgaagtaatgaacaagctgcagcgagcaaatccagacgacccagcttatgatgaaaacaagcgccagtgtcaagaagccatcaaggtgatgaacgactatgtcgataaaattattgcagatcgcaaagcaaggggtgaacaaagccatgatttattaacgcagatgctaaacggaaaagatccagaaacgggtgagccgcttgatgacgggaacattcgttatcaaattattacattcttaattgcgggacacgaaacaacaagtggtcttttatcatttgcgctgtatttcttagtgaaaaatccacatgtattacaaaaagtagcagaagaagcagcacgagttctagtagatcctgttccaagctacaaacaagtcaaacagcttaaatatgtcggcatggtcttaaacgaagcgctgcgcttatggccaactgctcctgcgttttccctatatgcaaaagaagatacggtgcttggaggagaatatcctttaaccaaaggcgacgaagtaatggttctgattcctcagcttcaccgtgataaaacaatttggggagacgatgtggaggagttccgtccagagcgttttgaaaatccaagtgcgattccgcagcatgcgtttaaaccgtttggaaacggtcagcgtgcgtgtatcggttggcagttcgctcttcatgaagcaacgctggtacttggtatgatgctaaaacactttgactttgaagatcatacaaactacgagctcgttattaaagaactgttaacgttaaaacctgaaggctttgtggtaaaagcaaaatcgaaaggcattccgcttggcggcattccttcacctagcactgaacagtctgctaaaaaagtacgcaaaaaggcagaaaacgctcataatacgccgctgcttgtgctatacggttcaaatgcgggaacagctgaaggaacggcgcgtgatttagcagatattgcaatgagcaaaggatttgcaccgcaggtcgcaacgcttgattcacacgccggaaatcttccgcgcgaaggagctgtattaattgtaacggcgtcttataacggtcatccgcctgataacgcaaagcaatttgtcgactggttagaccaagcgtctgctgatgaagtaaaaggcgttcgctactccgtatttggatgcggcgataaaaactgggctgcgacgtatcaaaaagtgcctgcttttatcgatgaaacgcttgccgctaaaggggcagaaaacatcgctgaccgcggtgaagcagatgcaagcgacgactttgaaggcgcgtatgaagaatggagtgatcatatgtggagtgacgtagcagcctactttaacctcgacattgaaaacagtgaagataataaatctactctttcacttcaatttgtcgacagcgccgcggatatgccgcttgcgaaaatgcacggtgcgttttcaacgaacgtcgtagcaagcaaagaacttcaacagccaggcagtgcacgaagcacgcgacatcttgaaattgaacttccaaaagaagcttcttatcaagaaggagatcatttaggtgttattcctcgcaactatgaaggaatagtaaaccgtgtaacagcaaggttcggcctaagcgcatcacagcaaatccgtctggaagcagaagaagaaaaattagctcatttgccactcgctaaaacagtatccgtagaagagcttctgcaatacgtggagcttcaagatcctgttacgcgcacgcagcttcgcgcaatggctgctaaaacggtctgcccgccgcataaagtagagcttgaagccttgcttgaaaagcaagcctacaaagaacaagtgctggcaaaacgtttaacaatgcttgaactgcttgaaaaatacccggcgtgtgaaatgaaattcagcgaatttatcgcccttctgccaagcatacgcccgcgctattactcgatttcttcatcacctcgtgtcgatgaaaaacaagcaagcatcacggtcagcgttgtctcaggaccggcgtggagcggatatggagaatataaaggaattgcgtcgaactatcttgccgagctgcaagaaggagatacgattacgtgctttatttccacagatcagtcagaatttacgctgccaaaagaccctgaaacgccgcttatcatggtcggaccgggaacaggcgtcgcgccgtttagaggctttgtgcaggcgcgcaaacagctaaaagaacaaggacagtcacttggagaagcacatttatacttcggctgccgttcacctcatgaagactatctgtatcaagaagagcttgaaaacgcccaaagcgaaggcatcattacgcttcataccgctttttctcgcatgccaaatcagccgaaaacatacgttcagcacgtaatggaacaagacggcaagaaattgattgaacttcttgatcaaggagcgcacttctatatttgcggagacggaagccaaatggcacctgccgttgaagcaacgcttatgaaaagctatgctgacgttcaccaagtgagtgaagcagacgctcgcttatggctgcagcagctagaagaaaaaggccgatacgcaaaagacgtgtgggctggg

SEQ ID NO: 564 - protein, 1049 aa, synthetic construct
  REGION 1..1049: note = Variant of cytochrome P450
MTIKEMPQPKTFGELKNLPLLNTDKPVQALMRIADELGEIFKFEAPGSVTRFLSSQRLIKEACDERRFDKNLSQGLKFARDFLGDGLFTSWTHEPNWKKAHNILGPSFSQRAMKRYHAMMVDIAVQLVQKWERLNADEHIEVSEDMTRLTLDTIGLCGFNYRFNSFYRDQPHPFIVSVERALDEVMNKLQRANPDDPAYDENKRQCQEAIKVMNDYVDKIIADRKARGEQSHDLLTQMLNGKDPETGEPLDDGNIRYQIITFLIAGHETTSGLLSFALYFLVKNPHVLQKVAEEAARVLVDPVPSYKQVKQLKYVGMVLNEALRLWPTAPAFSLYAKEDTVLGGEYPLTKGDEVMVLIPQLHRDKTIWGDDVEEFRPERFENPSAIPQHAFKPFGNGQRACIGWQFALHEATLVLGMMLKHFDFEDHTNYELVIKELLTLKPEGFVVKAKSKGIPLGGIPSPSTEQSAKKVRKKAENAHNTPLLVLYGSNAGTAEGTARDLADIAMSKGFAPQVATLDSHAGNLPREGAVLIVTASYNGHPPDNAKQFVDWLDQASADEVKGVRYSVFGCGDKNWAATYQKVPAFIDETLAAKGAENIADRGEADASDDFEGAYEEWSDHMWSDVAAYFNLDIENSEDNKSTLSLQFVDSAADMPLAKMHGAFSTNVVASKELQQPGSARSTRHLEIELPKEASYQEGDHLGVIPRNYEGIVNRVTARFGLSASQQIRLEAEEEKLAHLPLAKTVSVEELLQYVELQDPVTRTQLRAMAAKTVCPPHKVELEALLEKQAYKEQVLAKRLTMLELLEKYPACEMKFSEFIALLPSIRPRYYSISSSPRVDEKQASITVSVVSGPAWSGYGEYKGIASNYLAELQEGDTITCFISTDQSEFTLPKDPETPLIMVGPGTGVAPFRGFVQARKQLKEQGQSLGEAHLYFGCRSPHEDYLYQEELENAQSEGIITLHTAFSRMPNQPKTYVQHVMEQDGKKLIELLDQGAHFYICGDGSQMAPAVEATLMKSYADVHQVSEADARLWLQQLEEKGRYAKDVWAG

SEQ ID NO: 565 - DNA, 3147 bp, synthetic construct
  misc_feature 1..3147: note = Variant of cytochrome P450
  source 1..3147: mol_type = other DNA
atgacaattaaggaaatgcctcagcctaagacgtttggagaacttaaaaatttaccgttattaaacacagataaaccggttcaagctttgatgcgtattgcggatgaattaggagaaatctttaaattcgaggcgcctggtagcgtaacgcgctttttatcaagtcagcgtctaattaaagaagcatgcgatgaatcaatgtttgataaaaacttaagtcaaggccttaaatttgcacgtgattttcttggagacgggttatttacaagctggacgcatgaaccgaattggaaaaaagcgcataatatcttaggcccaagctttagtcagcgtgcaatgaaacgttatcatgcgatgatggtcgatatcgccgtgcagcttgttcaaaagtgggagcgtctaaatgcagatgagcatattgaagtatcggaagacatgacacgtttaacgctggatacaattggtctttgcggcttcaactatcgctttaacagcttttaccgagatcagcctcatccatttattgtgagtgttgagcgtgcactggatgaagtaatgaacaagctgcagcgagcaaatccagacgacccagcttatgatgaaaacaagcgccagtgtcaagaagatatcaaggtgatgaacgactatgtcgataaaattattgcagatcgcaaagcaaggggtgaacaaagccatgatttattaacgcagatgctaaacggaaaagatccagaaacgggtgagccgcttgatgacgggaacattcgttatcaaattattacattcttaattgcgggacacgaaacaacaagtggtcttttatcatttgcgctgtatttcttagtgaaaaatccacatgtattacaaaaagtagcagaagaagcagcacgagttctagtagatcctgttccaagctacaaacaagtcaaacagcttaaatatgtcggcatggtcttaaacgaagcgctgcgcttatggccaactgctcctgcgttttccctatatgcaaaagaagatacggtgcttggaggagaatatcctttaaccaaaggcgacgaagtaatggttctgattcctcagcttcaccgtgataaaacaatttggggagacgatgtggaggagttccgtccagagcgttttgaaaatccaagtgcgattccgcagcatgcgtttaaaccgtttggaaacggtcagcgtgcgtgtatcggtcagcagttcgctcttcatgaagcaacgctggtacttggtatgatgctaaaacactttgactttgaagatcatacaaactacgagctcgttattaaagaaaagttaacgttaaaacctgaaggctttgtggtaaaagcaaaatcgaaaggcattccgcttggcggtattccttcacctagcactgaacagtctgctaaaaaagtacgcaaaaaggcagaaaacgctcataatacgccgctgcttgtgctatacggttcaaatgcgggaacagctgaaggaacggcgcgtgatttagcagatattgcaatgagcaaaggatttgcaccgcaggtcgcaacgcttgattcacacgccggaaatcttccgcgcgaaggagctgtattaattgtaacggcgtcttataacggtcatccgcctgataacgcaaagcaatttgtcgactggttagaccaagcgtctgctgatgaagtaaaaggcgttcgctactccgtatttggatgcggcgataaaaactgggctgcgacgtatcaaaaagtgcctgcttttatcgatgaaacgcttgccgctaaaggggcagaaaacatcgctgaccgcggtgaagcagatgcaagcgacgactttgaaggcacatatgaagaatggagtgatcatatgtggagtgacgtagcagcctactttaacctcgacattgaaaacagtgaagataataaatctactctttcacttcaatttgtcgacagcgccgcggatatgccgcttgcgaaaatgcacggtgcgttttcaacgaacgtcgtagcaagcaaagaacttcaacagccaggcagtgcacgaagcacgcgacatcttgaaattgaacttccaaaagaagcttcttatcaagaaggagatcatttaggtgttattcctcgcaactatgaaggaatagtaaaccgtgtaacagcaaggttcggcctaagcgcatcacagcaaatccgtctggaagcagaagaagaaaaattagctcatttgccactcgctaaaacagtatccgtagaagagcttctgcaatacgtggagcttcaagatcctgttacgcgcacgcagcttcgcgcaatggctgctaaaacggtctgcccgccgcataaagtagagcttgaagccttgcttgaaaagcaagcctacaaagaacaagtgctggcaaaacgtttaacaatgcttgaactgcttgaaaaatacccggcgtgtgaaatgaaattcagcgaatttatcgcccttctgccaagcatacgcccgcgctattactcgatttcttcatcacctcgtgtcgatgaaaaacaagcaagcatcacggtcagcgttgtctcaggaccggcgtggagcggatatggagaatataaaggaattgcgtcgaactatcttgccgagctgcaagaaggagatacgattacgtgctttatttccacagatcagtcagaatttacgctgccaaaagaccctgaaacgccgcttatcatggtcggaccgggaacaggcgtcgcgccgtttagaggctttgtgcaggcgcgcaaacagctaaaagaacaaggacagtcacttggagaagcacatttatacttcggctgccgttcacctcatgaagactatctgtatcaagaagagcttgaaaacgcccaaagcgaaggcatcattacgcttcataccgctttttctcgcatgccaaatcagccgaaaacatacgttcagcacgtaatggaacaagacggcaagaaattgattgaacttcttgatcaaggagcgcacttctatatttgcggagacggaagccaaatggcacctgccgttgaagcaacgcttatgaaaagctatgctgacgttcaccaagtgagtgaagcagacgctcgcttatggctgcagcagctagaagaaaaaggccgatacgcaaaagacgtgtgggctggg

SEQ ID NO: 566 - protein, 1049 aa, synthetic construct
  REGION 1..1049: note = Variant of cytochrome P450
MTIKEMPQPKTFGELKNLPLLNTDKPVQALMRIADELGEIFKFEAPGSVTRFLSSQRLIKEACDESMFDKNLSQGLKFARDFLGDGLFTSWTHEPNWKKAHNILGPSFSQRAMKRYHAMMVDIAVQLVQKWERLNADEHIEVSEDMTRLTLDTIGLCGFNYRFNSFYRDQPHPFIVSVERALDEVMNKLQRANPDDPAYDENKRQCQEDIKVMNDYVDKIIADRKARGEQSHDLLTQMLNGKDPETGEPLDDGNIRYQIITFLIAGHETTSGLLSFALYFLVKNPHVLQKVAEEAARVLVDPVPSYKQVKQLKYVGMVLNEALRLWPTAPAFSLYAKEDTVLGGEYPLTKGDEVMVLIPQLHRDKTIWGDDVEEFRPERFENPSAIPQHAFKPFGNGQRACIGQQFALHEATLVLGMMLKHFDFEDHTNYELVIKEKLTLKPEGFVVKAKSKGIPLGGIPSPSTEQSAKKVRKKAENAHNTPLLVLYGSNAGTAEGTARDLADIAMSKGFAPQVATLDSHAGNLPREGAVLIVTASYNGHPPDNAKQFVDWLDQASADEVKGVRYSVFGCGDKNWAATYQKVPAFIDETLAAKGAENIADRGEADASDDFEGTYEEWSDHMWSDVAAYFNLDIENSEDNKSTLSLQFVDSAADMPLAKMHGAFSTNVVASKELQQPGSARSTRHLEIELPKEASYQEGDHLGVIPRNYEGIVNRVTARFGLSASQQIRLEAEEEKLAHLPLAKTVSVEELLQYVELQDPVTRTQLRAMAAKTVCPPHKVELEALLEKQAYKEQVLAKRLTMLELLEKYPACEMKFSEFIALLPSIRPRYYSISSSPRVDEKQASITVSVVSGPAWSGYGEYKGIASNYLAELQEGDTITCFISTDQSEFTLPKDPETPLIMVGPGTGVAPFRGFVQARKQLKEQGQSLGEAHLYFGCRSPHEDYLYQEELENAQSEGIITLHTAFSRMPNQPKTYVQHVMEQDGKKLIELLDQGAHFYICGDGSQMAPAVEATLMKSYADVHQVSEADARLWLQQLEEKGRYAKDVWAG

SEQ ID NO: 567 - DNA, 3147 bp, synthetic construct
  misc_feature 1..3147: note = Variant of cytochrome P450
  source 1..3147: mol_type = other DNA
atgacaattaaggaaatgcctcagcctaagacgtttggagaacttaaaaatttaccgttattaaacacagataaaccggttcaagctttgatgcgtattgcggatgaattaggagaaatctttaaattcgaggcgcctggtagcgtaacgcgctttttatcaagtcagcgtctaattaaagaagcatgcgatgaatcacgctttgataaaaacttaagtcaaggccttaaatttgcacgtgattttcttggagacgggttatttacaagctggacgcatgaaccgaattggaaaaaagcgcataatatcttaggcccaagctttagtcagcgtgcaatgaaacgttatcatgcgatgatggtcgatatcgccgtgcagcttgttcaaaagtgggagcgtctaaatgcagatgagcatattgaagtatcggaagacatgacacgtttaacgctggatacaattggtctttgcggcttcaactatcgctttaacagcttttaccgagatcagcctcatccatttattgtgagtgttgagcgtgcactggatgaagtaatgaacaagctgcagcgagcaaatccagacgacccagcttatgatgaaaacaagcgccagtgtcaagaagatatcaaggtgatgaacgactatgtcgataaaattattgcagatcgcaaagcaaggggtgaacaaagccatgatttattaacgcagatgctaaacggaaaagatccagaaacgggtgagccgcttgatgacgggaacattcgttatcaaattattacattcttaattgcgggacacgaaacaacaagtggtcttttatcatttgcgctgtatttcttagtgaaaaatccacatgtattacaaaaagtagcagaagaagcagcacgagttctagtagatcctgttccaagctacaaacaagtcaaacagcttaaatatgtcggcatggtcttaaacgaagcgctgcgcttatggccaactgctcctgcgttttccctatatgcaaaagaagatacggtgcttggaggagaatatcctttaaccaaaggcgacgaagtaatggttctgattcctcagcttcaccgtgataaaacaatttggggagacgattatgaggagttccgtccagagcgttttgaaaatccaagtgcgattccgcagcatgcgtttaaaccgtttggaaacggtcagcgtgcgtgtatcggtcagcagttcgctcttcatgaagcaacgctggtacttggtatgatgctaaaacactttgactttgaagatcatacaaactacgagctcgttattaaagaaaagttaacgttaaaacctgaaggctttgtggtaaaagcaaaatcgaaaggcattccgcttggcggtattccttcacctagcactgaacagtctgctaaaaaagtacgcaaaaaggcagaaaacgctcataatacgccgctgcttgtgctatacggttcaaatgcgggaacagctgaaggaacggcgcgtgatttagcagatattgcaatgagcaaaggatttgcaccgcaggtcgcaacgcttgattcacacgccggaaatcttccgcgcgaaggagctgtattaattgtaacggcgtcttataacggtcatccgcctgataacgcaaagcaatttgtcgactggttagaccaagcgtctgctgatgaagtaaaaggcgttcgctactccgtatttggatgcggcgataaaaactgggctgcgacgtatcaaaaagtgcctgcttttatcgatgaaacgcttgccgctaaaggggcagaaaacatcgctgaccgcggtgaagcagatgcaagcgacgactttgaaggcacatatgaagaatggagtgatcatatgtggagtgacgtagcagcctactttaacctcgacattgaaaacagtgaagataataaatctactctttcacttcaatttgtcgacagcgccgcggatatgccgcttgcgaaaatgcacggtgcgttttcaacgaacgtcgtagcaagcaaagaacttcaacagccaggcagtgcacgaagcacgcgacatcttgaaattgaacttccaaaagaagcttcttatcaagaaggagatcatttaggtgttattcctcgcaactatgaaggaatagtaaaccgtgtaacagcaaggttcggcctaagcgcatcacagcaaatccgtctggaagcagaagaagaaaaattagctcatttgccactcgctaaaacagtatccgtagaagagcttctgcaatacgtggagcttcaagatcctgttacgcgcacgcagcttcgcgcaatggctgctaaaacggtctgcccgccgcataaagtagagcttgaagccttgcttgaaaagcaagcctacaaagaacaagtgctggcaaaacgtttaacaatgcttgaactgcttgaaaaatacccggcgtgtgaaatgaaattcagcgaatttatcgcccttctgccaagcatacgcccgcgctattactcgatttcttcatcacctcgtgtcgatgaaaaacaagcaagcatcacggtcagcgttgtctcaggaccggcgtggagcggatatggagaatataaaggaattgcgtcgaactatcttgccgagctgcaagaaggagatacgattacgtgctttatttccacagatcagtcagaatttacgctgccaaaagaccctgaaacgccgcttatcatggtcggaccgggaacaggcgtcgcgccgtttagaggctttgtgcaggcgcgcaaacagctaaaagaacaaggacagtcacttggagaagcacatttatacttcggctgccgttcacctcatgaagactatctgtatcaagaagagcttgaaaacgcccaaagcgaaggcatcattacgcttcataccgctttttctcgcatgccaaatcagccgaaaacatacgttcagcacgtaatggaacaagacggcaagaaattgattgaacttcttgatcaaggagcgcacttctatatttgcggagacggaagccaaatggcacctgccgttgaagcaacgcttatgaaaagctatgctgacgttcaccaagtgagtgaagcagacgctcgcttatggctgcagcagctagaagaaaaaggccgatacgcaaaagacgtgtgggctggg

SEQ ID NO: 568 - protein, 1049 aa, synthetic construct
  REGION 1..1049: note = Variant of cytochrome P450
MTIKEMPQPKTFGELKNLPLLNTDKPVQALMRIADELGEIFKFEAPGSVTRFLSSQRLIKEACDESRFDKNLSQGLKFARDFLGDGLFTSWTHEPNWKKAHNILGPSFSQRAMKRYHAMMVDIAVQLVQKWERLNADEHIEVSEDMTRLTLDTIGLCGFNYRFNSFYRDQPHPFIVSVERALDEVMNKLQRANPDDPAYDENKRQCQEDIKVMNDYVDKIIADRKARGEQSHDLLTQMLNGKDPETGEPLDDGNIRYQIITFLIAGHETTSGLLSFALYFLVKNPHVLQKVAEEAARVLVDPVPSYKQVKQLKYVGMVLNEALRLWPTAPAFSLYAKEDTVLGGEYPLTKGDEVMVLIPQLHRDKTIWGDDYEEFRPERFENPSAIPQHAFKPFGNGQRACIGQQFALHEATLVLGMMLKHFDFEDHTNYELVIKEKLTLKPEGFVVKAKSKGIPLGGIPSPSTEQSAKKVRKKAENAHNTPLLVLYGSNAGTAEGTARDLADIAMSKGFAPQVATLDSHAGNLPREGAVLIVTASYNGHPPDNAKQFVDWLDQASADEVKGVRYSVFGCGDKNWAATYQKVPAFIDETLAAKGAENIADRGEADASDDFEGTYEEWSDHMWSDVAAYFNLDIENSEDNKSTLSLQFVDSAADMPLAKMHGAFSTNVVASKELQQPGSARSTRHLEIELPKEASYQEGDHLGVIPRNYEGIVNRVTARFGLSASQQIRLEAEEEKLAHLPLAKTVSVEELLQYVELQDPVTRTQLRAMAAKTVCPPHKVELEALLEKQAYKEQVLAKRLTMLELLEKYPACEMKFSEFIALLPSIRPRYYSISSSPRVDEKQASITVSVVSGPAWSGYGEYKGIASNYLAELQEGDTITCFISTDQSEFTLPKDPETPLIMVGPGTGVAPFRGFVQARKQLKEQGQSLGEAHLYFGCRSPHEDYLYQEELENAQSEGIITLHTAFSRMPNQPKTYVQHVMEQDGKKLIELLDQGAHFYICGDGSQMAPAVEATLMKSYADVHQVSEADARLWLQQLEEKGRYAKDVWAG

SEQ ID NO: 569 - DNA, 3147 bp, synthetic construct
  misc_feature 1..3147: note = Variant of cytochrome P450
  source 1..3147: mol_type = other DNA
atgacaattaaggaaatgcctcagcctaagacgtttggagaacttaaaaatttaccgttattaaacacagataaaccggttcaagctttgatgcgtattgcggatgaattaggagaaatctttaaattcgaggcgcctggtagcgtaacgcgctttttatcaagtcagcgtctaattaaagaagcatgcgatgaatcacgctttgataaaaacttaagtcaaggccttaaatttgcacgtgattttcttggagacgggttatttacaagctggacgcatgaaccgaattggaaaaaagcgcataatatcttaggcccaagctttagtcagcgtgcaatgaaacgttatcatgcgatgatggtcgatatcgccgtgcagcttgttcaaaagtgggagcgtctaaatgcagatgagcatattgaagtatcggaagacatgacacgtttaacgctggatacaattggtctttgcggcttcaactatcgctttaacagcttttaccgagatcagcctcatccatttattgtgagtgttgagcgtgcactggatgaagtaatgaacaagctgcagcgagcaaatccagacgacccagcttatgatgaaaacaagcgccagtgtcaagaagatatcaaggtgatgaacgactatgtcgataaaattattgcagatcgcaaagcaaggggtgaacaaagccatgatttattaacgcagatgctaaacggaaaagatccagaaacgggtgagccgcttgatgacgggaacattcgttatcaaattattacattcttaattgcgggacacgaaacaacaagtggtcttttatcatttgcgctgtatttcttagtgaaaaatccacatgtattacaaaaagtagcagaagaagcagcacgagttctagtagatcctgttccaagctacaaacaagtcaaacagcttaaatatgtcggcatggtcttaaacgaagcgctgcgcttatggccaactgctcctgcgttttccctatatgcaaaagaagatacggtgcttggaggagaatatcctttaaccaaaggcgacgaagtaatggttctgattcctcagcttcaccgtgataaaacaatttggggagacgatagtgaggagttccgtccagagcgttttgaaaatccaagtgcgattccgcagcatgcgtttaaaccgtttggaaacggtcagcgtgcgtgtatcggtcagcagttcgctcttcatgaagcaacgctggtacttggtatgatgctaaaacactttgactttgaagatcatacaaactacgagctcgttattaaagaaaagttaacgttaaaacctgaaggctttgtggtaaaagcaaaatcgaaaggcattccgcttggcggtattccttcacctagcactgaacagtctgctaaaaaagtacgcaaaaaggcagaaaacgctcataatacgccgctgcttgtgctatacggttcaaatgcgggaacagctgaaggaacggcgcgtgatttagcagatattgcaatgagcaaaggatttgcaccgcaggtcgcaacgcttgattcacacgccggaaatcttccgcgcgaaggagctgtattaattgtaacggcgtcttataacggtcatccgcctgataacgcaaagcaatttgtcgactggttagaccaagcgtctgctgatgaagtaaaaggcgttcgctactccgtatttggatgcggcgataaaaactgggctgcgacgtatcaaaaagtgcctgcttttatcgatgaaacgcttgccgctaaaggggcagaaaacatcgctgaccgcggtgaagcagatgcaagcgacgactttgaaggcacatatgaagaatggagtgatcatatgtggagtgacgtagcagcctactttaacctcgacattgaaaacagtgaagataataaatctactctttcacttcaatttgtcgacagcgccgcggatatgccgcttgcgaaaatgcacggtgcgttttcaacgaacgtcgtagcaagcaaagaacttcaacagccaggcagtgcacgaagcacgcgacatcttgaaattgaacttccaaaagaagcttcttatcaagaaggagatcatttaggtgttattcctcgcaactatgaaggaatagtaaaccgtgtaacagcaaggttcggcctaagcgcatcacagcaaatccgtctggaagcagaagaagaaaaattagctcatttgccactcgctaaaacagtatccgtagaagagcttctgcaatacgtggagcttcaagatcctgttacgcgcacgcagcttcgcgcaatggctgctaaaacggtctgcccgccgcataaagtagagcttgaagccttgcttgaaaagcaagcctacaaagaacaagtgctggcaaaacgtttaacaatgcttgaactgcttgaaaaatacccggcgtgtgaaatgaaattcagcgaatttatcgcccttctgccaagcatacgcccgcgctattactcgatttcttcatcacctcgtgtcgatgaaaaacaagcaagcatcacggtcagcgttgtctcaggaccggcgtggagcggatatggagaatataaaggaattgcgtcgaactatcttgccgagctgcaagaaggagatacgattacgtgctttatttccacagatcagtcagaatttacgctgccaaaagaccctgaaacgccgcttatcatggtcggaccgggaacaggcgtcgcgccgtttagaggctttgtgcaggcgcgcaaacagctaaaagaacaaggacagtcacttggagaagcacatttatacttcggctgccgttcacctcatgaagactatctgtatcaagaagagcttgaaaacgcccaaagcgaaggcatcattacgcttcataccgctttttctcgcatgccaaatcagccgaaaacatacgttcagcacgtaatggaacaagacggcaagaaattgattgaacttcttgatcaaggagcgcacttctatatttgcggagacggaagccaaatggcacctgccgttgaagcaacgcttatgaaaagctatgctgacgttcaccaagtgagtgaagcagacgctcgcttatggctgcagcagctagaagaaaaaggccgatacgcaaaagacgtgtgggctggg

SEQ ID NO: 570 - protein, 1049 aa, synthetic construct
  REGION 1..1049: note = Variant of cytochrome P450
MTIKEMPQPKTFGELKNLPLLNTDKPVQALMRIADELGEIFKFEAPGSVTRFLSSQRLIKEACDESRFDKNLSQGLKFARDFLGDGLFTSWTHEPNWKKAHNILGPSFSQRAMKRYHAMMVDIAVQLVQKWERLNADEHIEVSEDMTRLTLDTIGLCGFNYRFNSFYRDQPHPFIVSVERALDEVMNKLQRANPDDPAYDENKRQCQEDIKVMNDYVDKIIADRKARGEQSHDLLTQMLNGKDPETGEPLDDGNIRYQIITFLIAGHETTSGLLSFALYFLVKNPHVLQKVAEEAARVLVDPVPSYKQVKQLKYVGMVLNEALRLWPTAPAFSLYAKEDTVLGGEYPLTKGDEVMVLIPQLHRDKTIWGDDSEEFRPERFENPSAIPQHAFKPFGNGQRACIGQQFALHEATLVLGMMLKHFDFEDHTNYELVIKEKLTLKPEGFVVKAKSKGIPLGGIPSPSTEQSAKKVRKKAENAHNTPLLVLYGSNAGTAEGTARDLADIAMSKGFAPQVATLDSHAGNLPREGAVLIVTASYNGHPPDNAKQFVDWLDQASADEVKGVRYSVFGCGDKNWAATYQKVPAFIDETLAAKGAENIADRGEADASDDFEGTYEEWSDHMWSDVAAYFNLDIENSEDNKSTLSLQFVDSAADMPLAKMHGAFSTNVVASKELQQPGSARSTRHLEIELPKEASYQEGDHLGVIPRNYEGIVNRVTARFGLSASQQIRLEAEEEKLAHLPLAKTVSVEELLQYVELQDPVTRTQLRAMAAKTVCPPHKVELEALLEKQAYKEQVLAKRLTMLELLEKYPACEMKFSEFIALLPSIRPRYYSISSSPRVDEKQASITVSVVSGPAWSGYGEYKGIASNYLAELQEGDTITCFISTDQSEFTLPKDPETPLIMVGPGTGVAPFRGFVQARKQLKEQGQSLGEAHLYFGCRSPHEDYLYQEELENAQSEGIITLHTAFSRMPNQPKTYVQHVMEQDGKKLIELLDQGAHFYICGDGSQMAPAVEATLMKSYADVHQVSEADARLWLQQLEEKGRYAKDVWAG

SEQ ID NO: 571 - DNA, 3147 bp, synthetic construct
  misc_feature 1..3147: note = Variant of cytochrome P450
  source 1..3147: mol_type = other DNA
atgacaattaaggaaatgcctcagcctaagacgtttggagaacttaaaaatttaccgttattaaacacagataaaccggttcaagctttgatgcgtattgcggatgaattaggagaaatctttaaattcgaggcgcctggtagcgtaacgcgctttttatcaagtcagcgtctaattaaagaagcatgcgatgaacgtcgctttgataaaaacttaagtcaaggccttaaatttgcacgtgattttcttggagacgggttatttacaagctggacgcatgaaccgaattggaaaaaagcgcataatatcttaggcccaagctttagtcagcgtgcaatgaaacgttatcatgcgatgatggtcgatatcgccgtgcagcttgttcaaaagtgggagcgtctaaatgcagatgagcatattgaagtatcggaagacatgacacgtttaacgctggatacaattggtctttgcggcttcaactatcgctttaacagcttttaccgagatcagcctcatccatttattgtgagtgttgagggtgcactggatgaagtaatgaacaagctgcagcgagcaaatccagacgacccagcttatgatgaaaacaagcgccagtgtcaagaagatatcaaggtgatgaacgactatgtcgataaaattattgcagatcgcaaagcaaggggtgaacaaagccatgatttattaacgcagatgctaaacggaaaagatccagaaacgggtgagccgcttgatgacgggaacattcgttatcaaattattacattcttaattgcgggacacgaaacaacaagtggtcttttatcatttgcgctgtatttcttagtgaaaaatccacatgtattacaaaaagtagcagaagaagcagcacgagttctagtagatcctgttccaagctacaaacaagtcaaacagcttaaatatgtcggcatggtcttaaacgaagcgctgcgcttatggccaactgctcctgcgttttccctatatgcaaaagaagatacggtgcttggaggagaatatcctttaaccaaaggcgacgaagtaatggttctgattcctcagcttcaccgtgataaaacaatttggggagacgatgtggaggagttccgtccagagcgttttgaaaatccaagtgcgattccgcagcatgcgtttaaaccgtttggaaacggtcagcgtgcgtgtatcggttggcagttcgctcttcatgaagcaacgctggtacttggtatgatgctaaaacactttgactttgaagatcatacaaactacgagctcgttattaaagaaaagttaacgttaaaacctgaaggctttgtggtaaaagcaaaatcgaaaggcattccgcttggcctgattccttcacctagcactgaacagtctgctaaaaaagtacgcaaaaaggcagaaaacgctcataatacgccgctgcttgtgctatacggttcaaatgcgggaacagctgaaggaacggcgcgtgatttagcagatattgcaatgagcaaaggatttgcaccgcaggtcgcaacgcttgattcacacgccggaaatcttccgcgcgaaggagctgtattaattgtaacggcgtcttataacggtcatccgcctgataacgcaaagcaatttgtcgactggttagaccaagcgtctgctgatgaagtaaaaggcgttcgctactccgtatttggatgcggcgataaaaactgggctgcgacgtatcaaaaagtgcctgcttttatcgatgaaacgcttgccgctaaaggggcagaaaacatcgctgaccgcggtgaagcagatgcaagcgacgactttgaaggcacgtatgaagaatggagtgatcatatgtggagtgacgtagcagcctactttaacctcgacattgaaaacagtgaagataataaatctactctttcacttcaatttgtcgacagcgccgcggatatgccgcttgcgaaaatgcacggtgcgttttcaacgaacgtcgtagcaagcaaagaacttcaacagccaggcagtgcacgaagcacgcgacatcttgaaattgaacttccaaaagaagcttcttatcaagaaggagatcatttaggtgttattcctcgcaactatgaaggaatagtaaaccgtgtaacagcaaggttcggcctaagcgcatcacagcaaatccgtctggaagcagaagaagaaaaattagctcatttgccactcgctaaaacagtatccgtagaagagcttctgcaatacgtggagcttcaagatcctgttacgcgcacgcagcttcgcgcaatggctgctaaaacggtctgcccgccgcataaagtagagcttgaagccttgcttgaaaagcaagcctacaaagaacaagtgctggcaaaacgtttaacaatgcttgaactgcttgaaaaatacccggcgtgtgaaatgaaattcagcgaatttatcgcccttctgccaagcatacgcccgcgctattactcgatttcttcatcacctcgtgtcgatgaaaaacaagcaagcatcacggtcagcgttgtctcaggaccggcgtggagcggatatggagaatataaaggaattgcgtcgaactatcttgccgagctgcaagaaggagatacgattacgtgctttatttccacagatcagtcagaatttacgctgccaaaagaccctgaaacgccgcttatcatggtcggaccgggaacaggcgtcgcgccgtttagaggctttgtgcaggcgcgcaaacagctaaaagaacaaggacagtcacttggagaagcacatttatacttcggctgccgttcacctcatgaagactatctgtatcaagaagagcttgaaaacgcccaaagcgaaggcatcattacgcttcataccgctttttctcgcatgccaaatcagccgaaaacatacgttcagcacgtaatggaacaagacggcaagaaattgattgaacttcttgatcaaggagcgcacttctatatttgcggagacggaagccaaatggcacctgccgttgaagcaacgcttatgaaaagctatgctgacgttcaccaagtgagtgaagcagacgctcgcttatggctgcagcagctagaagaaaaaggccgatacgcaaaagacgtgtgggctggg

SEQ ID NO: 572 - protein, 1049 aa, synthetic construct
  REGION 1..1049: note = Variant of cytochrome P450
MTIKEMPQPKTFGELKNLPLLNTDKPVQALMRIADELGEIFKFEAPGSVTRFLSSQRLIKEACDERRFDKNLSQGLKFARDFLGDGLFTSWTHEPNWKKAHNILGPSFSQRAMKRYHAMMVDIAVQLVQKWERLNADEHIEVSEDMTRLTLDTIGLCGFNYRFNSFYRDQPHPFIVSVEGALDEVMNKLQRANPDDPAYDENKRQCQEDIKVMNDYVDKIIADRKARGEQSHDLLTQMLNGKDPETGEPLDDGNIRYQIITFLIAGHETTSGLLSFALYFLVKNPHVLQKVAEEAARVLVDPVPSYKQVKQLKYVGMVLNEALRLWPTAPAFSLYAKEDTVLGGEYPLTKGDEVMVLIPQLHRDKTIWGDDVEEFRPERFENPSAIPQHAFKPFGNGQRACIGWQFALHEATLVLGMMLKHFDFEDHTNYELVIKEKLTLKPEGFVVKAKSKGIPLGLIPSPSTEQSAKKVRKKAENAHNTPLLVLYGSNAGTAEGTARDLADIAMSKGFAPQVATLDSHAGNLPREGAVLIVTASYNGHPPDNAKQFVDWLDQASADEVKGVRYSVFGCGDKNWAATYQKVPAFIDETLAAKGAENIADRGEADASDDFEGTYEEWSDHMWSDVAAYFNLDIENSEDNKSTLSLQFVDSAADMPLAKMHGAFSTNVVASKELQQPGSARSTRHLEIELPKEASYQEGDHLGVIPRNYEGIVNRVTARFGLSASQQIRLEAEEEKLAHLPLAKTVSVEELLQYVELQDPVTRTQLRAMAAKTVCPPHKVELEALLEKQAYKEQVLAKRLTMLELLEKYPACEMKFSEFIALLPSIRPRYYSISSSPRVDEKQASITVSVVSGPAWSGYGEYKGIASNYLAELQEGDTITCFISTDQSEFTLPKDPETPLIMVGPGTGVAPFRGFVQARKQLKEQGQSLGEAHLYFGCRSPHEDYLYQEELENAQSEGIITLHTAFSRMPNQPKTYVQHVMEQDGKKLIELLDQGAHFYICGDGSQMAPAVEATLMKSYADVHQVSEADARLWLQQLEEKGRYAKDVWAG

SEQ ID NO: 573 - DNA, 3147 bp, synthetic construct
  misc_feature 1..3147: note = Variant of cytochrome P450
  source 1..3147: mol_type = other DNA
atgacaattaaggaaatgcctcagcctaagacgtttggagaacttaaaaatttaccgttattaaacacagataaaccggttcaagctttgatgcgtattgcggatgaattaggagaaatctttaaattcgaggcgcctggtagcgtaacgcgctttttatcaagtcagcgtctaattaaagaagcatgcgatgaatcacgctttgataaaaacttaagtcaaggccttaaatttgcacgtgattttcttggagacgggttatttacaagctggacgcatgaaccgaattggaaaaaagcgcataatatcttaggcccaagctttagtcagcgtgcaatgaaacgttatcatgcgatgatggtcgatatcgccgtgcagcttgttcaaaagtgggagcgtctaaatgcagatgagcatattgaagtatcggaagacatgacacgtttaacgctggatacaattggtctttgcggcttcaactatcgctttaacagcttttaccgagatcagcctcatccatttattgtgagtgttgagcgtgcactggatgaagtaatgaacaagctgcagcgagcaaatccagacgacccagcttatgatgaaaacaagcgccagtgtcaagaagatatcaaggtgatgaacgactatgtcgataaaattattgcagatcgcaaagcaaggggtgaacaaagccatgatttattaacgcagatgctaaacggaaaagatccagaaacgggtgagccgcttgatgacgggaacattcgttatcaaattcttacattcttaattgcgggacacgaaacaacaagtggtcttttatcatttgcgctgtatttcttagtgaaaaatccacatgtattacaaaaagtagcagaagaagcagcacgagttctagtagatcctgttccaagctacaaacaagtcaaacagcttaaatatgtcggcatggtcttaaacgaagcgctgcgcttatggccaactgctcctgcgttttccctatatgcaaaagaagatacggtgcttggaggagaatatcctttaaccaaaggcgacgaagtaatggttctgattcctcagcttcaccgtgataaaacaatttggggagacgatgtggaggagttccgtccagagcgttttgaaaatccaagtgcgattccgcagcatgcgtttaaaccgtttggaaacggtcagcgtgcgtgtatcggtcagcagttcgctcttcatgaagcaacgctggtacttggtatgatgctaaaacactttgactttgaagatcatacaaactacgagctcgttattaaagaaaagttaacgttaaaacctgaaggctttgtggtaaaagcaaaatcgaaaggcattccgcttggcggtattccttcacctagcactgaacagtctgctaaaaaagtacgcaaaaaggcagaaaacgctcataatacgccgctgcttgtgctatacggttcaaatgcgggaacagctgaaggaacggcgcgtgatttagcagatattgcaatgagcaaaggatttgcaccgcaggtcgcaacgcttgattcacacgccggaaatcttccgcgcgaaggagctgtattaattgtaacggcgtcttataacggtcatccgcctgataacgcaaagcaatttgtcgactggttagaccaagcgtctgctgatgaagtaaaaggcgttcgctactccgtatttggatgcggcgataaaaactgggctgcgacgtatcaaaaagtgcctgcttttatcgatgaaacgcttgccgctaaaggggcagaaaacatcgctgaccgcggtgaagcagatgcaagcgacgactttgaaggcacatatgaagaatggagtgatcatatgtggagtgacgtagcagcctactttaacctcgacattgaaaacagtgaagataataaatctactctttcacttcaatttgtcgacagcgccgcggatatgccgcttgcgaaaatgcacggtgcgttttcaacgaacgtcgtagcaagcaaagaacttcaacagccaggcagtgcacgaagcacgcgacatcttgaaattgaacttccaaaagaagcttcttatcaagaaggagatcatttaggtgttattcctcgcaactatgaaggaatagtaaaccgtgtaacagcaaggttcggcctaagcgcatcacagcaaatccgtctggaagcagaagaagaaaaattagctcatttgccactcgctaaaacagtatccgtagaagagcttctgcaatacgtggagcttcaagatcctgttacgcgcacgcagcttcgcgcaatggctgctaaaacggtctgcccgccgcataaagtagagcttgaagccttgcttgaaaagcaagcctacaaagaacaagtgctggcaaaacgtttaacaatgcttgaactgcttgaaaaatacccggcgtgtgaaatgaaattcagcgaatttatcgcccttctgccaagcatacgcccgcgctattactcgatttcttcatcacctcgtgtcgatgaaaaacaagcaagcatcacggtcagcgttgtctcaggaccggcgtggagcggatatggagaatataaaggaattgcgtcgaactatcttgccgagctgcaagaaggagatacgattacgtgctttatttccacagatcagtcagaatttacgctgccaaaagaccctgaaacgccgcttatcatggtcggaccgggaacaggcgtcgcgccgtttagaggctttgtgcaggcgcgcaaacagctaaaagaacaaggacagtcacttggagaagcacatttatacttcggctgccgttcacctcatgaagactatctgtatcaagaagagcttgaaaacgcccaaagcgaaggcatcattacgcttcataccgctttttctcgcatgccaaatcagccgaaaacatacgttcagcacgtaatggaacaagacggcaagaaattgattgaacttcttgatcaaggagcgcacttctatatttgcggagacggaagccaaatggcacctgccgttgaagcaacgcttatgaaaagctatgctgacgttcaccaagtgagtgaagcagacgctcgcttatggctgcagcagctagaagaaaaaggccgatacgcaaaagacgtgtgggctggg

SEQ ID NO: 574 - protein, 1049 aa, synthetic construct
  REGION 1..1049: note = Variant of cytochrome P450
MTIKEMPQPKTFGELKNLPLLNTDKPVQALMRIADELGEIFKFEAPGSVTRFLSSQRLIKEACDESRFDKNLSQGLKFARDFLGDGLFTSWTHEPNWKKAHNILGPSFSQRAMKRYHAMMVDIAVQLVQKWERLNADEHIEVSEDMTRLTLDTIGLCGFNYRFNSFYRDQPHPFIVSVERALDEVMNKLQRANPDDPAYDENKRQCQEDIKVMNDYVDKIIADRKARGEQSHDLLTQMLNGKDPETGEPLDDGNIRYQILTFLIAGHETTSGLLSFALYFLVKNPHVLQKVAEEAARVLVDPVPSYKQVKQLKYVGMVLNEALRLWPTAPAFSLYAKEDTVLGGEYPLTKGDEVMVLIPQLHRDKTIWGDDVEEFRPERFENPSAIPQHAFKPFGNGQRACIGQQFALHEATLVLGMMLKHFDFEDHTNYELVIKEKLTLKPEGFVVKAKSKGIPLGGIPSPSTEQSAKKVRKKAENAHNTPLLVLYGSNAGTAEGTARDLADIAMSKGFAPQVATLDSHAGNLPREGAVLIVTASYNGHPPDNAKQFVDWLDQASADEVKGVRYSVFGCGDKNWAATYQKVPAFIDETLAAKGAENIADRGEADASDDFEGTYEEWSDHMWSDVAAYFNLDIENSEDNKSTLSLQFVDSAADMPLAKMHGAFSTNVVASKELQQPGSARSTRHLEIELPKEASYQEGDHLGVIPRNYEGIVNRVTARFGLSASQQIRLEAEEEKLAHLPLAKTVSVEELLQYVELQDPVTRTQLRAMAAKTVCPPHKVELEALLEKQAYKEQVLAKRLTMLELLEKYPACEMKFSEFIALLPSIRPRYYSISSSPRVDEKQASITVSVVSGPAWSGYGEYKGIASNYLAELQEGDTITCFISTDQSEFTLPKDPETPLIMVGPGTGVAPFRGFVQARKQLKEQGQSLGEAHLYFGCRSPHEDYLYQEELENAQSEGIITLHTAFSRMPNQPKTYVQHVMEQDGKKLIELLDQGAHFYICGDGSQMAPAVEATLMKSYADVHQVSEADARLWLQQLEEKGRYAKDVWAG

SEQ ID NO: 575 - DNA, 3147 bp, synthetic construct
  misc_feature 1..3147: note = Variant of cytochrome P450
  source 1..3147: mol_type = other DNA
atgacaattaaggaaatgcctcagcctaagacgtttggagaacttaaaaatttaccgttattaaacacagataaaccggttcaagctttgatgcgtattgcggatgaattaggagaaatctttaaattcgaggcgcctggtagcgtaacgcgctttttatcaagtcagcgtctaattaaagaagcatgcgatgaatcacgctttgataaaaacttaagtcaaggccttaaatttgcacgtgattttcttggagacgggttatttacaagctggacgcatgaaccgaattggaaaaaagcgcataatatcttaggcccaagctttagtcagcgtgcaatgaaacgttatcatgcgatgatggtcgatatcgccgtgcagcttgttcaaaagtgggagcgtctaaatgcagatgagcatattgaagtatcggaagacatgacacgtttaacgctggatacaattggtctttgcggcttcaactatcgctttaacagcttttaccgagatcagcctcatccatttattgtgagtgttgagcgtgcactggatgaagtaatgaacaagctgcagcgagcaaatccagacgacccagcttatgatgaaaacaagcgccagtgtcaagaagatatcaaggtgatgaacgactatgtcgataaaattattgcagatcgcaaagcaaggggtgaacaaagccatgatttattaacgcagatgctaaacggaaaagatccagaaacgggtgagccgcttgatgacgggaacattcgttatcaaattattacattcttaattgcgggacacgaaacaacaagtggtcttttatcatttgcgctgtatttcttagtgaaaaatccacatgtattacaaaaagtagcagaagaagcagcacgagttctagtagatcctgttccaagctacaaacaagtcaaacagcttaaatatgtcggcatggtcttaaacgaagcgctgcgcttatggccaactgctcctgcgttttccctatatgcaaaagaagatacggtgcttggaggagaatatcctttaaccaaaggcgacgaagtaatggttctgattcctcagcttcaccgtgataaaacaatttggggagacgatgtggagaggttccgtccagagcgttttgaaaatccaagtgcgattccgcagcatgcgtttaaaccgtttggaaacggtcagcgtgcgtgtatcggtcagcagttcgctcttcatgaagcaacgctggtacttggtatgatgctaaaacactttgactttgaagatcatacaaactacgagctcgttattaaagaaaagttaacgttaaaacctgaaggctttgtggtaaaagcaaaatcgaaaggcattccgcttggcggtattccttcacctagcactgaacagtctgctaaaaaagtacgcaaaaaggcagaaaacgctcataatacgccgctgcttgtgctatacggttcaaatgcgggaacagctgaaggaacggcgcgtgatttagcagatattgcaatgagcaaaggatttgcaccgcaggtcgcaacgcttgattcacacgccggaaatcttccgcgcgaaggagctgtattaattgtaacggcgtcttataacggtcatccgcctgataacgcaaagcaatttgtcgactggttagaccaagcgtctgctgatgaagtaaaaggcgttcgctactccgtatttggatgcggcgataaaaactgggctgcgacgtatcaaaaagtgcctgcttttatcgatgaaacgcttgccgctaaaggggcagaaaacatcgctgaccgcggtgaagcagatgcaagcgacgactttgaaggcacatatgaagaatggagtgatcatatgtggagtgacgtagcagcctactttaacctcgacattgaaaacagtgaagataataaatctactctttcacttcaatttgtcgacagcgccgcggatatgccgcttgcgaaaatgcacggtgcgttttcaacgaacgtcgtagcaagcaaagaacttcaacagccaggcagtgcacgaagcacgcgacatcttgaaattgaacttccaaaagaagcttcttatcaagaaggagatcatttaggtgttattcctcgcaactatgaaggaatagtaaaccgtgtaacagcaaggttcggcctaagcgcatcacagcaaatccgtctggaagcagaagaagaaaaattagctcatttgccactcgctaaaacagtatccgtagaagagcttctgcaatacgtggagcttcaagatcctgttacgcgcacgcagcttcgcgcaatggctgctaaaacggtctgcccgccgcataaagtagagcttgaagccttgcttgaaaagcaagcctacaaagaacaagtgctggcaaaacgtttaacaatgcttgaactgcttgaaaaatacccggcgtgtgaaatgaaattcagcgaatttatcgcccttctgccaagcatacgcccgcgctattactcgatttcttcatcacctcgtgtcgatgaaaaacaagcaagcatcacggtcagcgttgtctcaggaccggcgtggagcggatatggagaatataaaggaattgcgtcgaactatcttgccgagctgcaagaaggagatacgattacgtgctttatttccacagatcagtcagaatttacgctgccaaaagaccctgaaacgccgcttatcatggtcggaccgggaacaggcgtcgcgccgtttagaggctttgtgcaggcgcgcaaacagctaaaagaacaaggacagtcacttggagaagcacatttatacttcggctgccgttcacctcatgaagactatctgtatcaagaagagcttgaaaacgcccaaagcgaaggcatcattacgcttcataccgctttttctcgcatgccaaatcagccgaaaacatacgttcagcacgtaatggaacaagacggcaagaaattgattgaacttcttgatcaaggagcgcacttctatatttgcggagacggaagccaaatggcacctgccgttgaagcaacgcttatgaaaagctatgctgacgttcaccaagtgagtgaagcagacgctcgcttatggctgcagcagctagaagaaaaaggccgatacgcaaaagacgtgtgggctggg

SEQ ID NO: 576 - protein, 1049 aa, synthetic construct
  REGION 1..1049: note = Variant of cytochrome P450
MTIKEMPQPKTFGELKNLPLLNTDKPVQALMRIADELGEIFKFEAPGSVTRFLSSQRLIKEACDESRFDKNLSQGLKFARDFLGDGLFTSWTHEPNWKKAHNILGPSFSQRAMKRYHAMMVDIAVQLVQKWERLNADEHIEVSEDMTRLTLDTIGLCGFNYRFNSFYRDQPHPFIVSVERALDEVMNKLQRANPDDPAYDENKRQCQEDIKVMNDYVDKIIADRKARGEQSHDLLTQMLNGKDPETGEPLDDGNIRYQIITFLIAGHETTSGLLSFALYFLVKNPHVLQKVAEEAARVLVDPVPSYKQVKQLKYVGMVLNEALRLWPTAPAFSLYAKEDTVLGGEYPLTKGDEVMVLIPQLHRDKTIWGDDVERFRPERFENPSAIPQHAFKPFGNGQRACIGQQFALHEATLVLGMMLKHFDFEDHTNYELVIKEKLTLKPEGFVVKAKSKGIPLGGIPSPSTEQSAKKVRKKAENAHNTPLLVLYGSNAGTAEGTARDLADIAMSKGFAPQVATLDSHAGNLPREGAVLIVTASYNGHPPDNAKQFVDWLDQASADEVKGVRYSVFGCGDKNWAATYQKVPAFIDETLAAKGAENIADRGEADASDDFEGTYEEWSDHMWSDVAAYFNLDIENSEDNKSTLSLQFVDSAADMPLAKMHGAFSTNVVASKELQQPGSARSTRHLEIELPKEASYQEGDHLGVIPRNYEGIVNRVTARFGLSASQQIRLEAEEEKLAHLPLAKTVSVEELLQYVELQDPVTRTQLRAMAAKTVCPPHKVELEALLEKQAYKEQVLAKRLTMLELLEKYPACEMKFSEFIALLPSIRPRYYSISSSPRVDEKQASITVSVVSGPAWSGYGEYKGIASNYLAELQEGDTITCFISTDQSEFTLPKDPETPLIMVGPGTGVAPFRGFVQARKQLKEQGQSLGEAHLYFGCRSPHEDYLYQEELENAQSEGIITLHTAFSRMPNQPKTYVQHVMEQDGKKLIELLDQGAHFYICGDGSQMAPAVEATLMKSYADVHQVSEADARLWLQQLEEKGRYAKDVWAG

SEQ ID NO: 577 - DNA, 3147 bp, synthetic construct
  misc_feature 1..3147: note = Variant of cytochrome P450
  source 1..3147: mol_type = other DNA
atgacaattaaggaaatgcctcagcctaagacgtttggagaacttaaaaatttaccgttattaaacacagataaaccggttcaagctttgatgcgtattgcggatgaattaggagaaatctttaaattcgaggcgcctggtagcgtaacgcgctttttatcaagtcagcgtctaattaaagaagcatgcgatgaatcacgctttgataaaaacttaagtcaaggccttaaatttgcacgtgattttcttggagacgggttatttacaagctggacgcatgaaccgaattggaaaaaagcgcataatatcttaggcccaagctttagtcagcgtgcaatgaaacgttatcatgcgatgatggtcgatatcgccgtgcagcttgttcaaaagtgggagcgtctaaatgcagatgagcatattgaagtatcggaagacatgacacgtttaacgctggatacaattggtctttgcggcttcaactatcgctttaacagcttttaccgagatcagcctcatccatttattgtgagtgttgagggtgcactggatgaagtaatgaacaagctgcagcgagcaaatccagacgacccagcttatgatgaaaacaagcgccagtgtcaagaagacatcaaggtgatgaacgactatgtcgataaaattattgcagatcgcaaagcaaggggtgaacaaagccatgatttattaacgcagatgctaaacggaaaagatccagaaacgggtgagccgcttgatgacgggaacattcgttatcaaattattacattcttaattgcgggacacgaaacaacaagtggtcttttatcatttgcgctgtatttcttagtgaaaaatccacatgtattacaaaaagtagcagaagaagcagcacgagttctagtagatcctgttccaagctacaaacaagtcaaacagcttaaatatgtcggcatggtcttaaacgaagcgctgcgcttatggccaactgctcctgcgttttccctatatgcaaaagaagatacggtgcttggaggagaatatcctttaaccaaaggcgacgaagtaatggttctgattcctcagcttcaccgtgataaaacaatttggggagacgatgtggaggagttccgtccagagcgttttgaaaatccaagtgcgattccgcagcatgcgtttaaaccgtttggaaacggtcagcgtgcgtgtatcggttggcagttcgctcttcatgaagcaacgctggtacttggtatgatgctaaaacactttgactttgaagatcatacaaactacgagctcgttattaaagaaaagttaacgttaaaacctgaaggctttgtggtaaaagcaaaatcgaaaggcattccgcttggcctgattccttcacctagcactgaacagtctgctaaaaaagtacgcaaaaaggcagaaaacgctcataatacgccgctgcttgtgctatacggttcaaatgcgggaacagctgaaggaacggcgcgtgatttagcagatattgcaatgagcaaaggatttgcaccgcaggtcgcaacgcttgattcacacgccggaaatcttccgcgcgaaggagctgtattaattgtaacggcgtcttataacggtcatccgcctgataacgcaaagcaatttgtcgactggttagaccaagcgtctgctgatgaagtaaaaggcgttcgctactccgtatttggatgcggcgataaaaactgggctgcgacgtatcaaaaagtgcctgcttttatcgatgaaacgcttgccgctaaaggggcagaaaacatcgctgaccgcggtgaagcagatgcaagcgacgactttgaaggcgcgtatgaagaatggagtgatcatatgtggagtgacgtagcagcctactttaacctcgacattgaaaacagtgaagataataaatctactctttcacttcaatttgtcgacagcgccgcggatatgccgcttgcgaaaatgcacggtgcgttttcaacgaacgtcgtagcaagcaaagaacttcaacagccaggcagtgcacgaagcacgcgacatcttgaaattgaacttccaaaagaagcttcttatcaagaaggagatcatttaggtgttattcctcgcaactatgaaggaatagtaaaccgtgtaacagcaaggttcggcctaagcgcatcacagcaaatccgtctggaagcagaagaagaaaaattagctcatttgccactcgctaaaacagtatccgtagaagagcttctgcaatacgtggagcttcaagatcctgttacgcgcacgcagcttcgcgcaatggctgctaaaacggtctgcccgccgcataaagtagagcttgaagccttgcttgaaaagcaagcctacaaagaacaagtgctggcaaaacgtttaacaatgcttgaactgcttgaaaaatacccggcgtgtgaaatgaaattcagcgaatttatcgcccttctgccaagcatacgcccgcgctattactcgatttcttcatcacctcgtgtcgatgaaaaacaagcaagcatcacggtcagcgttgtctcaggaccggcgtggagcggatatggagaatataaaggaattgcgtcgaactatcttgccgagctgcaagaaggagatacgattacgtgctttatttccacagatcagtcagaatttacgctgccaaaagaccctgaaacgccgcttatcatggtcggaccgggaacaggcgtcgcgccgtttagaggctttgtgcaggcgcgcaaacagctaaaagaacaaggacagtcacttggagaagcacatttatacttcggctgccgttcacctcatgaagactatctgtatcaagaagagcttgaaaacgcccaaagcgaaggcatcattacgcttcataccgctttttctcgcatgccaaatcagccgaaaacatacgttcagcacgtaatggaacaagacggcaagaaattgattgaacttcttgatcaaggagcgcacttctatatttgcggagacggaagccaaatggcacctgccgttgaagcaacgcttatgaaaagctatgctgacgttcaccaagtgagtgaagcagacgctcgcttatggctgcagcagctagaagaaaaaggccgatacgcaaaagacgtgtgggctggg

SEQ ID NO: 578 - protein, 1049 aa, synthetic construct
  REGION 1..1049: note = Variant of cytochrome P450
MTIKEMPQPKTFGELKNLPLLNTDKPVQALMRIADELGEIFKFEAPGSVTRFLSSQRLIKEACDESRFDKNLSQGLKFARDFLGDGLFTSWTHEPNWKKAHNILGPSFSQRAMKRYHAMMVDIAVQLVQKWERLNADEHIEVSEDMTRLTLDTIGLCGFNYRFNSFYRDQPHPFIVSVEGALDEVMNKLQRANPDDPAYDENKRQCQEDIKVMNDYVDKIIADRKARGEQSHDLLTQMLNGKDPETGEPLDDGNIRYQIITFLIAGHETTSGLLSFALYFLVKNPHVLQKVAEEAARVLVDPVPSYKQVKQLKYVGMVLNEALRLWPTAPAFSLYAKEDTVLGGEYPLTKGDEVMVLIPQLHRDKTIWGDDVEEFRPERFENPSAIPQHAFKPFGNGQRACIGWQFALHEATLVLGMMLKHFDFEDHTNYELVIKEKLTLKPEGFVVKAKSKGIPLGLIPSPSTEQSAKKVRKKAENAHNTPLLVLYGSNAGTAEGTARDLADIAMSKGFAPQVATLDSHAGNLPREGAVLIVTASYNGHPPDNAKQFVDWLDQASADEVKGVRYSVFGCGDKNWAATYQKVPAFIDETLAAKGAENIADRGEADASDDFEGAYEEWSDHMWSDVAAYFNLDIENSEDNKSTLSLQFVDSAADMPLAKMHGAFSTNVVASKELQQPGSARSTRHLEIELPKEASYQEGDHLGVIPRNYEGIVNRVTARFGLSASQQIRLEAEEEKLAHLPLAKTVSVEELLQYVELQDPVTRTQLRAMAAKTVCPPHKVELEALLEKQAYKEQVLAKRLTMLELLEKYPACEMKFSEFIALLPSIRPRYYSISSSPRVDEKQASITVSVVSGPAWSGYGEYKGIASNYLAELQEGDTITCFISTDQSEFTLPKDPETPLIMVGPGTGVAPFRGFVQARKQLKEQGQSLGEAHLYFGCRSPHEDYLYQEELENAQSEGIITLHTAFSRMPNQPKTYVQHVMEQDGKKLIELLDQGAHFYICGDGSQMAPAVEATLMKSYADVHQVSEADARLWLQQLEEKGRYAKDVWAG

SEQ ID NO: 579 - DNA, 3147 bp, synthetic construct
  misc_feature 1..3147: note = Variant of cytochrome P450
  source 1..3147: mol_type = other DNA
atgacaattaaggaaatgcctcagcctaagacgtttggagaacttaaaaatttaccgttattaaacacagataaaccggttcaagctttgatgcgtattgcggatgaattaggagaaatctttaaattcgaggcgcctggtagcgtaacgcgctttttatcaagtcagcgtctaattaaagaagcatgcgatgaaagtcgctttgataaaaacttaagtcaaggccttaaatttgcacgtgattttcttggagacgggttatttacaagctggacgcatgaaccgaattggaaaaaagcgcataatatcttaggcccaagctttagtcagcgtgcaatgaaacgttatcatgcgatgatggtcgatatcgccgtgcagcttgttcaaaagtgggagcgtctaaatgtagatgagcatattgaagtatcggaagacatgacacgtttaacgctggatacaattggtctttgcggcttcaactatcgctttaacagcttttaccgagatcagcctcatccatttattgtgagtgttgagcgtgcactggatgaagtaatgaacaagctgcagcgagcaaatccagacgacccagcttatgatgaaaacaagcgccagtgtcaagaagatatcaaggtgatgaacgactatgtcgataaaattattgcagatcgcaaagcaaggggtgaacaaagccatgatttattaacgcagatgctaaacggaaaagatccagaaacgggtgagccgcttgatgacgggaacattcgttatcaaattattacattcttaattgcgggacacgaaacaacaagtggtcttttatcatttgcgctgtatttcttagtgaaaaatccacatgtattacaaaaagtagcagaagaagcagcacgagttctagtagatcctgttccaagctacaaacaagtcaaacagcttaaatatgtcggcatggtcttaaacgaagcgctgcgcttatggccaactgctcctgcgttttccctatatgcaaaagaagatacggtgcttggaggagaatatcctttaaccaaaggcgacgaagtaatggttctgattcctcagcttcaccgtgataaaacaatttggggagacgatgtggaggagttccgtccagagcgttttgaaaatccaagtgcgattccgcagcatgcgtttaaaccgtttggaaacggtcagcgtgcgtgtatcggtcagcagttcgctcttcatgaagcaacgctggtacttggtatgatgctaaaacactttgactttgaagatcatacaaactacgagctcgttattaaagaaatgttaacgttaaaacctgaaggctttgtggtaaaagcaaaatcgaaaggcattccgcttggcggtattccttcacctagcactgaacagtctgctaaaaaagtacgcaaaaaggcagaaaacgctcataatacgccgctgcttgtgctatacggttcaaatgcgggaacagctgaaggaacggcgcgtgatttagcagatattgcaatgagcaaaggatttgcaccgcaggtcgcaacgcttgattcacacgccggaaatcttccgcgcgaaggagctgtattaattgtaacggcgtcttataacggtcatccgcctgataacgcaaagcaatttgtcgactggttagaccaagcgtctgctgatgaagtaaaaggcgttcgctactccgtatttggatgcggcgataaaaactgggctgcgacgtatcaaaaagtgcctgcttttatcgatgaaacgcttgccgctaaaggggcagaaaacatcgctgaccgcggtgaagcagatgcaagcgacgactttgaaggcgcgtatgaagaatggagtgatcatatgtggagtgacgtagcagcctactttaacctcgacattgaaaacagtgaagataataaatctactctttcacttcaatttgtcgacagcgccgcggatatgccgcttgcgaaaatgcacggtgcgttttcaacgaacgtcgtagcaagcaaagaacttcaacagccaggcagtgcacgaagcacgcgacatcttgaaattgaacttccaaaagaagcttcttatcaagaaggagatcatttaggtgttattcctcgcaactatgaaggaatagtaaaccgtgtaacagcaaggttcggcctaagcgcatcacagcaaatccgtctggaagcagaagaagaaaaattagctcatttgccactcgctaaaacagtatccgtagaagagcttctgcaatacgtggagcttcaagatcctgttacgcgcacgcagcttcgcgcaatggctgctaaaacggtctgcccgccgcataaagtagagcttgaagccttgcttgaaaagcaagcctacaaagaacaagtgctggcaaaacgtttaacaatgcttgaactgcttgaaaaatacccggcgtgtgaaatgaaattcagcgaatttatcgcccttctgccaagcatacgcccgcgctattactcgatttcttcatcacctcgtgtcgatgaaaaacaagcaagcatcacggtcagcgttgtctcaggaccggcgtggagcggatatggagaatataaaggaattgcgtcgaactatcttgccgagctgcaagaaggagatacgattacgtgctttatttccacagatcagtcagaatttacgctgccaaaagaccctgaaacgccgcttatcatggtcggaccgggaacaggcgtcgcgccgtttagaggctttgtgcaggcgcgcaaacagctaaaagaacaaggacagtcacttggagaagcacatttatacttcggctgccgttcacctcatgaagactatctgtatcaagaagagcttgaaaacgcccaaagcgaaggcatcattacgcttcataccgctttttctcgcatgccaaatcagccgaaaacatacgttcagcacgtaatggaacaagacggcaagaaattgattgaacttcttgatcaaggagcgcacttctatatttgcggagacggaagccaaatggcacctgccgttgaagcaacgcttatgaaaagctatgctgacgttcaccaagtgagtgaagcagacgctcgcttatggctgcagcagctagaagaaaaaggccgatacgcaaaagacgtgtgggctggg

SEQ ID NO: 580 - protein, 1049 aa, synthetic construct
  REGION 1..1049: note = Variant of cytochrome P450
MTIKEMPQPKTFGELKNLPLLNTDKPVQALMRIADELGEIFKFEAPGSVTRFLSSQRLIKEACDESRFDKNLSQGLKFARDFLGDGLFTSWTHEPNWKKAHNILGPSFSQRAMKRYHAMMVDIAVQLVQKWERLNVDEHIEVSEDMTRLTLDTIGLCGFNYRFNSFYRDQPHPFIVSVERALDEVMNKLQRANPDDPAYDENKRQCQEDIKVMNDYVDKIIADRKARGEQSHDLLTQMLNGKDPETGEPLDDGNIRYQIITFLIAGHETTSGLLSFALYFLVKNPHVLQKVAEEAARVLVDPVPSYKQVKQLKYVGMVLNEALRLWPTAPAFSLYAKEDTVLGGEYPLTKGDEVMVLIPQLHRDKTIWGDDVEEFRPERFENPSAIPQHAFKPFGNGQRACIGQQFALHEATLVLGMMLKHFDFEDHTNYELVIKEMLTLKPEGFVVKAKSKGIPLGGIPSPSTEQSAKKVRKKAENAHNTPLLVLYGSNAGTAEGTARDLADIAMSKGFAPQVATLDSHAGNLPREGAVLIVTASYNGHPPDNAKQFVDWLDQASADEVKGVRYSVFGCGDKNWAATYQKVPAFIDETLAAKGAENIADRGEADASDDFEGAYEEWSDHMWSDVAAYFNLDIENSEDNKSTLSLQFVDSAADMPLAKMHGAFSTNVVASKELQQPGSARSTRHLEIELPKEASYQEGDHLGVIPRNYEGIVNRVTARFGLSASQQIRLEAEEEKLAHLPLAKTVSVEELLQYVELQDPVTRTQLRAMAAKTVCPPHKVELEALLEKQAYKEQVLAKRLTMLELLEKYPACEMKFSEFIALLPSIRPRYYSISSSPRVDEKQASITVSVVSGPAWSGYGEYKGIASNYLAELQEGDTITCFISTDQSEFTLPKDPETPLIMVGPGTGVAPFRGFVQARKQLKEQGQSLGEAHLYFGCRSPHEDYLYQEELENAQSEGIITLHTAFSRMPNQPKTYVQHVMEQDGKKLIELLDQGAHFYICGDGSQMAPAVEATLMKSYADVHQVSEADARLWLQQLEEKGRYAKDVWAG

SEQ ID NO: 581 - DNA, 3147 bp, synthetic construct
  misc_feature 1..3147: note = Variant of cytochrome P450
  source 1..3147: mol_type = other DNA
atgacaattaaggaaatgcctcagcctaagacgtttggagaacttaaaaatttaccgttattaaacacagataaaccggttcaagctttgatgcgtattgcggatgaattaggagaaatctttaaattcgaggcgcctggtagcgtaacgcgctttttatcaagtcagcgtctaattaaagaagcatgcgatgaatcacgctttgataaaaacttaagtcaaggccttaaatttgcacgtgattttcttggagacgggttatttacaagctggacgcatgaaccgaattggaaaaaagcgcataatatcttaggcccaagctttagtcagcgtgcaatgaggcgttatcatgcgatgatggtcgatatcgccgtgcagcttgttcaaaagtgggagcgtctaaatgcagatgagcatattgaagtatcggaagacatgacacgtttaacgctggatacaattggtctttgcggcttcaactatcgctttaacagcttttaccgagatcagcctcatccatttattgtgagtgttgagcgtgcactggatgaagtaatgaacaagctgcagcgagcaaatccagacgacccagcttatgatgaaaacaagcgccagtgtcaagaagatatcaaggtgatgaacgactatgtcgataaaattattgcagatcgcaaagcaaggggtgaacaaagccatgatttattaacgcagatgctaaacggaaaagatccagaaacgggtgagccgcttgatgacgggaacattcgttatcaaattattacattcttaattgcgggacacgaaacaacaagtggtcttttatcatttgcgctgtatttcttagtgaaaaatccacatgtattacaaaaagtagcagaagaagcagcacgagttctagtagatcctgttccaagctacaaacaagtcaaacagcttaaatatgtcggcatggtcttaaacgaagcgctgcgcttatggccaactgctcctgcgttttccctatatgcaaaagaagatacggtgcttggaggagaatatcctttaaccaaaggcgacgaagtaatggttctgattcctcagcttcaccgtgataaaacaatttggggagacgatgtggaggagttccgtccagagcgttttgaaaatccaagtgcgattccgcagcatgcgtttaaaccgtttggaaacggtcagcgtgcgtgtatcggtcagcagttcgctcttcatgaagcaacgctggtacttggtatgatgctaaaacactttgactttgaagatcatacaaactacgagctcgttattaaagaaaagttaacgttaaaacctgaaggctttgtggtaaaagcaaaatcgaaaggcattccgcttggcggtattccttcacctagcactgaacagtctgctaaaaaagtacgcaaaaaggcagaaaacgctcataatacgccgctgcttgtgctatacggttcaaatgcgggaacagctgaaggaacggcgcgtgatttagcagatattgcaatgagcaaaggatttgcaccgcaggtcgcaacgcttgattcacacgccggaaatcttccgcgcgaaggagctgtattaattgtaacggcgtcttataacggtcatccgcctgataacgcaaagcaatttgtcgactggttagaccaagcgtctgctgatgaagtaaaaggcgttcgctactccgtatttggatgcggcgataaaaactgggctgcgacgtatcaaaaagtgcctgcttttatcgatgaaacgcttgccgctaaaggggcagaaaacatcgctgaccgcggtgaagcagatgcaagcgacgactttgaaggcacatatgaagaatggagtgatcatatgtggagtgacgtagcagcctactttaacctcgacattgaaaacagtgaagataataaatctactctttcacttcaatttgtcgacagcgccgcggatatgccgcttgcgaaaatgcacggtgcgttttcaacgaacgtcgtagcaagcaaagaacttcaacagccaggcagtgcacgaagcacgcgacatcttgaaattgaacttccaaaagaagcttcttatcaagaaggagatcatttaggtgttattcctcgcaactatgaaggaatagtaaaccgtgtaacagcaaggttcggcctaagcgcatcacagcaaatccgtctggaagcagaagaagaaaaattagctcatttgccactcgctaaaacagtatccgtagaagagcttctgcaatacgtggagcttcaagatcctgttacgcgcacgcagcttcgcgcaatggctgctaaaacggtctgcccgccgcataaagtagagcttgaagccttgcttgaaaagcaagcctacaaagaacaagtgctggcaaaacgtttaacaatgcttgaactgcttgaaaaatacccggcgtgtgaaatgaaattcagcgaatttatcgcccttctgccaagcatacgcccgcgctattactcgatttcttcatcacctcgtgtcgatgaaaaacaagcaagcatcacggtcagcgttgtctcaggaccggcgtggagcggatatggagaatataaaggaattgcgtcgaactatcttgccgagctgcaagaaggagatacgattacgtgctttatttccacagatcagtcagaatttacgctgccaaaagaccctgaaacgccgcttatcatggtcggaccgggaacaggcgtcgcgccgtttagaggctttgtgcaggcgcgcaaacagctaaaagaacaaggacagtcacttggagaagcacatttatacttcggctgccgttcacctcatgaagactatctgtatcaagaagagcttgaaaacgcccaaagcgaaggcatcattacgcttcataccgctttttctcgcatgccaaatcagccgaaaacatacgttcagcacgtaatggaacaagacggcaagaaattgattgaacttcttgatcaaggagcgcacttctatatttgcggagacggaagccaaatggcacctgccgttgaagcaacgcttatgaaaagctatgctgacgttcaccaagtgagtgaagcagacgctcgcttatggctgcagcagctagaagaaaaaggccgatacgcaaaagacgtgtgggctggg

SEQ ID NO: 582 - protein, 1049 aa, synthetic construct
  REGION 1..1049: note = Variant of cytochrome P450
MTIKEMPQPKTFGELKNLPLLNTDKPVQALMRIADELGEIFKFEAPGSVTRFLSSQRLIKEACDESRFDKNLSQGLKFARDFLGDGLFTSWTHEPNWKKAHNILGPSFSQRAMRRYHAMMVDIAVQLVQKWERLNADEHIEVSEDMTRLTLDTIGLCGFNYRFNSFYRDQPHPFIVSVERALDEVMNKLQRANPDDPAYDENKRQCQEDIKVMNDYVDKIIADRKARGEQSHDLLTQMLNGKDPETGEPLDDGNIRYQIITFLIAGHETTSGLLSFALYFLVKNPHVLQKVAEEAARVLVDPVPSYKQVKQLKYVGMVLNEALRLWPTAPAFSLYAKEDTVLGGEYPLTKGDEVMVLIPQLHRDKTIWGDDVEEFRPERFENPSAIPQHAFKPFGNGQRACIGQQFALHEATLVLGMMLKHFDFEDHTNYELVIKEKLTLKPEGFVVKAKSKGIPLGGIPSPSTEQSAKKVRKKAENAHNTPLLVLYGSNAGTAEGTARDLADIAMSKGFAPQVATLDSHAGNLPREGAVLIVTASYNGHPPDNAKQFVDWLDQASADEVKGVRYSVFGCGDKNWAATYQKVPAFIDETLAAKGAENIADRGEADASDDFEGTYEEWSDHMWSDVAAYFNLDIENSEDNKSTLSLQFVDSAADMPLAKMHGAFSTNVVASKELQQPGSARSTRHLEIELPKEASYQEGDHLGVIPRNYEGIVNRVTARFGLSASQQIRLEAEEEKLAHLPLAKTVSVEELLQYVELQDPVTRTQLRAMAAKTVCPPHKVELEALLEKQAYKEQVLAKRLTMLELLEKYPACEMKFSEFIALLPSIRPRYYSISSSPRVDEKQASITVSVVSGPAWSGYGEYKGIASNYLAELQEGDTITCFISTDQSEFTLPKDPETPLIMVGPGTGVAPFRGFVQARKQLKEQGQSLGEAHLYFGCRSPHEDYLYQEELENAQSEGIITLHTAFSRMPNQPKTYVQHVMEQDGKKLIELLDQGAHFYICGDGSQMAPAVEATLMKSYADVHQVSEADARLWLQQLEEKGRYAKDVWAG

SEQ ID NO: 583 - DNA, 3147 bp, synthetic construct
  misc_feature 1..3147: note = Variant of cytochrome P450
  source 1..3147: mol_type = other DNA
atgacaattaaggaaatgcctcagcctaagacgtttggagaacttaaaaatttaccgttattaaacacagataaaccggttcaagctttgatgcgtattgcggatgaattaggagaaatctttaaattcgaggcgcctggtagcgtaacgcgctttttatcaagtcagcgtctaattaaagaagcatgcgatgaatcacgctttgataaaaacttaagtcaaggccttaaatttgcacgtgattttcttggagacgggttatttacaagctggacgcatgaaccgaattggaaaaaagcgcataatatcttaggcccaagctttagtcagcgtgcaatgaaacgttatcatgcgatgatggtcgatatcgccgtgcagcttgttcaaaagtgggagcgtctaaatgcagatgagcatattgaagtatcggaagacatgacacgtttaacgctggatacaattggtctttgcggcttcaactatcgctttaacagcttttaccgagatcagatgcatccatttattgtgagtgttgagcgtgcactggatgaagtaatgaacaagctgcagcgagcaaatccagacgacccagcttatgatgaaaacaagcgccagtgtcaagaagatatcaaggtgatgaacgactatgtcgataaaattattgcagatcgcaaagcaaggggtgaacaaagccatgatttattaacgcagatgctaaacggaaaagatccagaaacgggtgagccgcttgatgacgggaacattcgttatcaaattattacattcttaattgcgggacacgaaacaacaagtggtcttttatcatttgcgctgtatttcttagtgaaaaatccacatgtattacaaaaagtagcagaagaagcagcacgagttctagtagatcctgttccaagctacaaacaagtcaaacagcttaaatatgtcggcatggtcttaaacgaagcgctgcgcttatggccaactgctcctgcgttttccctatatgcaaaagaagatacggtgcttggaggagaatatcctttaaccaaaggcgacgaagtaatggttctgattcctcagcttcaccgtgataaaacaatttggggagacgatgtggaggagttccgtccagagcgttttgaaaatccaagtgcgattccgcagcatgcgtttaaaccgtttggaaacggtcagcgtgcgtgtatcggtcagcagttcgctcttcatgaagcaacgctggtacttggtatgatgctaaaacactttgactttgaagatcatacaaactacgagctcgttattaaagaaaagttaacgttaaaacctgaaggctttgtggtaaaagcaaaatcgaaaggcattccgcttggcggtattccttcacctagcactgaacagtctgctaaaaaagtacgcaaaaaggcagaaaacgctcataatacgccgctgcttgtgctatacggttcaaatgcgggaacagctgaaggaacggcgcgtgatttagcagatattgcaatgagcaaaggatttgcaccgcaggtcgcaacgcttgattcacacgccggaaatcttccgcgcgaaggagctgtattaattgtaacggcgtcttataacggtcatccgcctgataacgcaaagcaatttgtcgactggttagaccaagcgtctgctgatgaagtaaaaggcgttcgctactccgtatttggatgcggcgataaaaactgggctgcgacgtatcaaaaagtgcctgcttttatcgatgaaacgcttgccgctaaaggggcagaaaacatcgctgaccgcggtgaagcagatgcaagcgacgactttgaaggcacatatgaagaatggagtgatcatatgtggagtgacgtagcagcctactttaacctcgacattgaaaacagtgaagataataaatctactctttcacttcaatttgtcgacagcgccgcggatatgccgcttgcgaaaatgcacggtgcgttttcaacgaacgtcgtagcaagcaaagaacttcaacagccaggcagtgcacgaagcacgcgacatcttgaaattgaacttccaaaagaagcttcttatcaagaaggagatcatttaggtgttattcctcgcaactatgaaggaatagtaaaccgtgtaacagcaaggttcggcctaagcgcatcacagcaaatccgtctggaagcagaagaagaaaaattagctcatttgccactcgctaaaacagtatccgtagaagagcttctgcaatacgtggagcttcaagatcctgttacgcgcacgcagcttcgcgcaatggctgctaaaacggtctgcccgccgcataaagtagagcttgaagccttgcttgaaaagcaagcctacaaagaacaagtgctggcaaaacgtttaacaatgcttgaactgcttgaaaaatacccggcgtgtgaaatgaaattcagcgaatttatcgcccttctgccaagcatacgcccgcgctattactcgatttcttcatcacctcgtgtcgatgaaaaacaagcaagcatcacggtcagcgttgtctcaggaccggcgtggagcggatatggagaatataaaggaattgcgtcgaactatcttgccgagctgcaagaaggagatacgattacgtgctttatttccacagatcagtcagaatttacgctgccaaaagaccctgaaacgccgcttatcatggtcggaccgggaacaggcgtcgcgccgtttagaggctttgtgcaggcgcgcaaacagctaaaagaacaaggacagtcacttggagaagcacatttatacttcggctgccgttcacctcatgaagactatctgtatcaagaagagcttgaaaacgcccaaagcgaaggcatcattacgcttcataccgctttttctcgcatgccaaatcagccgaaaacatacgttcagcacgtaatggaacaagacggcaagaaattgattgaacttcttgatcaaggagcgcacttctatatttgcggagacggaagccaaatggcacctgccgttgaagcaacgcttatgaaaagctatgctgacgttcaccaagtgagtgaagcagacgctcgcttatggctgcagcagctagaagaaaaaggccgatacgcaaaagacgtgtgggctggg

SEQ ID NO: 584 - protein, 1049 aa, synthetic construct
  REGION 1..1049: note = Variant of cytochrome P450
MTIKEMPQPKTFGELKNLPLLNTDKPVQALMRIADELGEIFKFEAPGSVTRFLSSQRLIKEACDESRFDKNLSQGLKFARDFLGDGLFTSWTHEPNWKKAHNILGPSFSQRAMKRYHAMMVDIAVQLVQKWERLNADEHIEVSEDMTRLTLDTIGLCGFNYRFNSFYRDQMHPFIVSVERALDEVMNKLQRANPDDPAYDENKRQCQEDIKVMNDYVDKIIADRKARGEQSHDLLTQMLNGKDPETGEPLDDGNIRYQIITFLIAGHETTSGLLSFALYFLVKNPHVLQKVAEEAARVLVDPVPSYKQVKQLKYVGMVLNEALRLWPTAPAFSLYAKEDTVLGGEYPLTKGDEVMVLIPQLHRDKTIWGDDVEEFRPERFENPSAIPQHAFKPFGNGQRACIGQQFALHEATLVLGMMLKHFDFEDHTNYELVIKEKLTLKPEGFVVKAKSKGIPLGGIPSPSTEQSAKKVRKKAENAHNTPLLVLYGSNAGTAEGTARDLADIAMSKGFAPQVATLDSHAGNLPREGAVLIVTASYNGHPPDNAKQFVDWLDQASADEVKGVRYSVFGCGDKNWAATYQKVPAFIDETLAAKGAENIADRGEADASDDFEGTYEEWSDHMWSDVAAYFNLDIENSEDNKSTLSLQFVDSAADMPLAKMHGAFSTNVVASKELQQPGSARSTRHLEIELPKEASYQEGDHLGVIPRNYEGIVNRVTARFGLSASQQIRLEAEEEKLAHLPLAKTVSVEELLQYVELQDPVTRTQLRAMAAKTVCPPHKVELEALLEKQAYKEQVLAKRLTMLELLEKYPACEMKFSEFIALLPSIRPRYYSISSSPRVDEKQASITVSVVSGPAWSGYGEYKGIASNYLAELQEGDTITCFISTDQSEFTLPKDPETPLIMVGPGTGVAPFRGFVQARKQLKEQGQSLGEAHLYFGCRSPHEDYLYQEELENAQSEGIITLHTAFSRMPNQPKTYVQHVMEQDGKKLIELLDQGAHFYICGDGSQMAPAVEATLMKSYADVHQVSEADARLWLQQLEEKGRYAKDVWAG

SEQ ID NO: 585 - DNA, 3147 bp, synthetic construct
  misc_feature 1..3147: note = Variant of cytochrome P450
  source 1..3147: mol_type = other DNA
atgacaattaaggaaatgcctcagcctaagacgtttggagaacttaaaaatttaccgttattaaacacagataaaccggttcaagctttgatgcgtattgcggatgaattaggagaaatctttaaattcgaggcgcctggtagcgtaacgcgctttttatcaagtcagcgtctaattaaagaagcatgcgatgaaagtcgctttgataaaaacttaagtcaaggccttaaatttgcacgtgattttcttggagacgggttatttacaagctggacgcatgaaccgaattggaaaaaagcgcataatatcttaggcccaagctttagtcagcgtgcaatgaaacgttatcatgcgatgatggtcgatatcgccgtgcagcttgttcaaaagtgggagcgtctaaatgcagatgagcatattgaagtatcggaagacatgacacgtttaacgctggatacaattggtctttgcggcttcaactatcgctttaacagcttttaccgagatcagcctcatccatttattgtgagtgttgagggtgcactggatgaagtaatgaacaagctgcagcgagcaaatccagacgacccagcttatgatgaaaacaagcgccagtgtcaagaagacatcaaggtgatgaacgactatgtcgataaaattattgcagatcgcaaagcaaggggtgaacaaagccatgatttattaacgcagatgctaaacggaaaagatccagaaacgggtgagccgcttgatgacgggaacattcgttatcaaattattacattcttaattgcgggacacgaaacaacaagtggtcttttatcatttgcgctgtatttcttagtgaaaaatccacatgtattacaaaaagtagcagaagaagcagcacgagttctagtagatcctgttccaagctacaaacaagtcaaacagcttaaatatgtcggcatggtcttaaacgaagcgctgcgcttatggccaactgctcctgcgttttccctatatgcaaaagaagatacggtgcttggaggagaatatcctttaaccaaaggcgacgaagtaatggttctgattcctcagcttcaccgtgataaaacaatttggggagacgatgtggaggagttccgtccagagcgttttgaaaatccaagtgcgattccgcagcatgcgtttaaaccgtttggaaacggtcagcgtgcgtgtatcggttggcagttcgctcttcatgaagcaacgctggtacttggtatgatgctaaaacactttgactttgaagatcatacaaactacgagctcgttattaaagaaaagttaacgttaaaacctgaaggctttgtggtaaaagcaaaatcgaaaggcattccgcttggcggtattccttcacctagcactgaacagtctgctaaaaaagtacgcaaaaaggcagaaaacgctcataatacgccgctgcttgtgctatacggttcaaatgcgggaacagctgaaggaacggcgcgtgatttagcagatattgcaatgagcaaaggatttgcaccgcaggtcgcaacgcttgattcacacgccggaaatcttccgcgcgaaggagctgtattaattgtaacggcgtcttataacggtcatccgcctgataacgcaaagcaatttgtcgactggttagaccaagcgtctgctgatgaagtaaaaggcgttcgctactccgtatttggatgcggcgataaaaactgggctgcgacgtatcaaaaagtgcctgcttttatcgatgaaacgcttgccgctaaaggggcagaaaacatcgctgaccgcggtgaagcagatgcaagcgacgactttgaaggcgcgtatgaagaatggagtgatcatatgtggagtgacgtagcagcctactttaacctcgacattgaaaacagtgaagataataaatctactctttcacttcaatttgtcgacagcgccgcggatatgccgcttgcgaaaatgcacggtgcgttttcaacgaacgtcgtagcaagcaaagaacttcaacagccaggcagtgcacgaagcacgcgacatcttgaaattgaacttccaaaagaagcttcttatcaagaaggagatcatttaggtgttattcctcgcaactatgaaggaatagtaaaccgtgtaacagcaaggttcggcctaagcgcatcacagcaaatccgtctggaagcagaagaagaaaaattagctcatttgccactcgctaaaacagtatccgtagaagagcttctgcaatacgtggagcttcaagatcctgttacgcgcacgcagcttcgcgcaatggctgctaaaacggtctgcccgccgcataaagtagagcttgaagccttgcttgaaaagcaagcctacaaagaacaagtgctggcaaaacgtttaacaatgcttgaactgcttgaaaaatacccggcgtgtgaaatgaaattcagcgaatttatcgcccttctgccaagcatacgcccgcgctattactcgatttcttcatcacctcgtgtcgatgaaaaacaagcaagcatcacggtcagcgttgtctcaggaccggcgtggagcggatatggagaatataaaggaattgcgtcgaactatcttgccgagctgcaagaaggagatacgattacgtgctttatttccacagatcagtcagaatttacgctgccaaaagaccctgaaacgccgcttatcatggtcggaccgggaacaggcgtcgcgccgtttagaggctttgtgcaggcgcgcaaacagctaaaagaacaaggacagtcacttggagaagcacatttatacttcggctgccgttcacctcatgaagactatctgtatcaagaagagcttgaaaacgcccaaagcgaaggcatcattacgcttcataccgctttttctcgcatgccaaatcagccgaaaacatacgttcagcacgtaatggaacaagacggcaagaaattgattgaacttcttgatcaaggagcgcacttctatatttgcggagacggaagccaaatggcacctgccgttgaagcaacgcttatgaaaagctatgctgacgttcaccaagtgagtgaagcagacgctcgcttatggctgcagcagctagaagaaaaaggccgatacgcaaaagacgtgtgggctggg

SEQ ID NO: 586 - protein, 1049 aa, synthetic construct
  REGION 1..1049: note = Variant of cytochrome P450
MTIKEMPQPKTFGELKNLPLLNTDKPVQALMRIADELGEIFKFEAPGSVTRFLSSQRLIKEACDESRFDKNLSQGLKFARDFLGDGLFTSWTHEPNWKKAHNILGPSFSQRAMKRYHAMMVDIAVQLVQKWERLNADEHIEVSEDMTRLTLDTIGLCGFNYRFNSFYRDQPHPFIVSVEGALDEVMNKLQRANPDDPAYDENKRQCQEDIKVMNDYVDKIIADRKARGEQSHDLLTQMLNGKDPETGEPLDDGNIRYQIITFLIAGHETTSGLLSFALYFLVKNPHVLQKVAEEAARVLVDPVPSYKQVKQLKYVGMVLNEALRLWPTAPAFSLYAKEDTVLGGEYPLTKGDEVMVLIPQLHRDKTIWGDDVEEFRPERFENPSAIPQHAFKPFGNGQRACIGWQFALHEATLVLGMMLKHFDFEDHTNYELVIKEKLTLKPEGFVVKAKSKGIPLGGIPSPSTEQSAKKVRKKAENAHNTPLLVLYGSNAGTAEGTARDLADIAMSKGFAPQVATLDSHAGNLPREGAVLIVTASYNGHPPDNAKQFVDWLDQASADEVKGVRYSVFGCGDKNWAATYQKVPAFIDETLAAKGAENIADRGEADASDDFEGAYEEWSDHMWSDVAAYFNLDIENSEDNKSTLSLQFVDSAADMPLAKMHGAFSTNVVASKELQQPGSARSTRHLEIELPKEASYQEGDHLGVIPRNYEGIVNRVTARFGLSASQQIRLEAEEEKLAHLPLAKTVSVEELLQYVELQDPVTRTQLRAMAAKTVCPPHKVELEALLEKQAYKEQVLAKRLTMLELLEKYPACEMKFSEFIALLPSIRPRYYSISSSPRVDEKQASITVSVVSGPAWSGYGEYKGIASNYLAELQEGDTITCFISTDQSEFTLPKDPETPLIMVGPGTGVAPFRGFVQARKQLKEQGQSLGEAHLYFGCRSPHEDYLYQEELENAQSEGIITLHTAFSRMPNQPKTYVQHVMEQDGKKLIELLDQGAHFYICGDGSQMAPAVEATLMKSYADVHQVSEADARLWLQQLEEKGRYAKDVWAG

SEQ ID NO: 587 - DNA, 3147 bp, synthetic construct
  misc_feature 1..3147: note = Variant of cytochrome P450
  source 1..3147: mol_type = other DNA
atgacaattaaggaaatgcctcagcctaagacgtttggagaacttaaaaatttaccgttattaaacacagataaaccggttcaagctttgatgcgtattgcggatgaattaggagaaatctttaaattcgaggcgcctggtagcgtaacgcgctttttatcaagtcagcgtctaattaaagaagcatgcgatgaatcacgctttgataaaaacttaagtcaaggccttaaatttgcacgtgattttcttggagacgggttatttacaagctggacgcatgaaccgaattggaaaaaagcgcataatatcttaggcccaagctttagtcagcgtgcaatgaaacgttatcatgcgatgatggtcgatatcgccgtgcagcttgttcaaaagtgggagcgtctaaatgcagatgagcatattgaagtatcggaagacatgacacgtttaacgctggatacaattggtctttgcggcttcaactatcgctttaacagcttttaccgagatcagcctcatccatttattgtgagtgttgagcgtgcactggatgaagtaatgaacaagctgcagcgagcaaatccagacgacccagcttatgatgaaaacaagcgccagtgtcaagaagatatcaaggtgatgaacgactatgtcgataaaattattgcagatcgcaaagcaaggggtgaacaaagccatgatttattaacgcagatgctaaacggaaaagatccagaaacgggtgagccgcttgatgacgggaacattcgttatcaaattattacattcttaattgcgggacacgaaacaacaagtggtcttttatcatttgcgctgtatttcttagtgaaaaatccacatgtattacaaaaagtagcagaagaagcagcacgagttctagtagatcctgttccaagctacaaacaagtcaaacagcttaaatatgtcggcatggtcttaaacgaagcgctgcgcttatggccaactgctcctgcgttttccctatatgcaaaagaagatacggtgcttggaggagaatatcctttaaccaaaggcgacgaagtaatggttctgattcctcagcttcaccgtgataaaacaatttggggagacgatgtggaggagttccgtccagagcgttttgaaaatccaagtgcgattccgcagcatgcgtttaaaccgtttggaaacggtcagcgtgcgtgtatcggtcagcagttcgctactcatgaagcaacgctggtacttggtatgatgctaaaacactttgactttgaagatcatacaaactacgagctcgttattaaagaaaagttaacgttaaaacctgaaggctttgtggtaaaagcaaaatcgaaaggcattccgcttggcggtattccttcacctagcactgaacagtctgctaaaaaagtacgcaaaaaggcagaaaacgctcataatacgccgctgcttgtgctatacggttcaaatgcgggaacagctgaaggaacggcgcgtgatttagcagatattgcaatgagcaaaggatttgcaccgcaggtcgcaacgcttgattcacacgccggaaatcttccgcgcgaaggagctgtattaattgtaacggcgtcttataacggtcatccgcctgataacgcaaagcaatttgtcgactggttagaccaagcgtctgctgatgaagtaaaaggcgttcgctactccgtatttggatgcggcgataaaaactgggctgcgacgtatcaaaaagtgcctgcttttatcgatgaaacgcttgccgctaaaggggcagaaaacatcgctgaccgcggtgaagcagatgcaagcgacgactttgaaggcacatatgaagaatggagtgatcatatgtggagtgacgtagcagcctactttaacctcgacattgaaaacagtgaagataataaatctactctttcacttcaatttgtcgacagcgccgcggatatgccgcttgcgaaaatgcacggtgcgttttcaacgaacgtcgtagcaagcaaagaacttcaacagccaggcagtgcacgaagcacgcgacatcttgaaattgaacttccaaaagaagcttcttatcaagaaggagatcatttaggtgttattcctcgcaactatgaaggaatagtaaaccgtgtaacagcaaggttcggcctaagcgcatcacagcaaatccgtctggaagcagaagaagaaaaattagctcatttgccactcgctaaaacagtatccgtagaagagcttctgcaatacgtggagcttcaagatcctgttacgcgcacgcagcttcgcgcaatggctgctaaaacggtctgcccgccgcataaagtagagcttgaagccttgcttgaaaagcaagcctacaaagaacaagtgctggcaaaacgtttaacaatgcttgaactgcttgaaaaatacccggcgtgtgaaatgaaattcagcgaatttatcgcccttctgccaagcatacgcccgcgctattactcgatttcttcatcacctcgtgtcgatgaaaaacaagcaagcatcacggtcagcgttgtctcaggaccggcgtggagcggatatggagaatataaaggaattgcgtcgaactatcttgccgagctgcaagaaggagatacgattacgtgctttatttccacagatcagtcagaatttacgctgccaaaagaccctgaaacgccgcttatcatggtcggaccgggaacaggcgtcgcgccgtttagaggctttgtgcaggcgcgcaaacagctaaaagaacaaggacagtcacttggagaagcacatttatacttcggctgccgttcacctcatgaagactatctgtatcaagaagagcttgaaaacgcccaaagcgaaggcatcattacgcttcataccgctttttctcgcatgccaaatcagccgaaaacatacgttcagcacgtaatggaacaagacggcaagaaattgattgaacttcttgatcaaggagcgcacttctatatttgcggagacggaagccaaatggcacctgccgttgaagcaacgcttatgaaaagctatgctgacgttcaccaagtgagtgaagcagacgctcgcttatggctgcagcagctagaagaaaaaggccgatacgcaaaagacgtgtgggctggg

SEQ ID NO: 588 - protein, 1049 aa, synthetic construct
  REGION 1..1049: note = Variant of cytochrome P450
MTIKEMPQPKTFGELKNLPLLNTDKPVQALMRIADELGEIFKFEAPGSVTRFLSSQRLIKEACDESRFDKNLSQGLKFARDFLGDGLFTSWTHEPNWKKAHNILGPSFSQRAMKRYHAMMVDIAVQLVQKWERLNADEHIEVSEDMTRLTLDTIGLCGFNYRFNSFYRDQPHPFIVSVERALDEVMNKLQRANPDDPAYDENKRQCQEDIKVMNDYVDKIIADRKARGEQSHDLLTQMLNGKDPETGEPLDDGNIRYQIITFLIAGHETTSGLLSFALYFLVKNPHVLQKVAEEAARVLVDPVPSYKQVKQLKYVGMVLNEALRLWPTAPAFSLYAKEDTVLGGEYPLTKGDEVMVLIPQLHRDKTIWGDDVEEFRPERFENPSAIPQHAFKPFGNGQRACIGQQFATHEATLVLGMMLKHFDFEDHTNYELVIKEKLTLKPEGFVVKAKSKGIPLGGIPSPSTEQSAKKVRKKAENAHNTPLLVLYGSNAGTAEGTARDLADIAMSKGFAPQVATLDSHAGNLPREGAVLIVTASYNGHPPDNAKQFVDWLDQASADEVKGVRYSVFGCGDKNWAATYQKVPAFIDETLAAKGAENIADRGEADASDDFEGTYEEWSDHMWSDVAAYFNLDIENSEDNKSTLSLQFVDSAADMPLAKMHGAFSTNVVASKELQQPGSARSTRHLEIELPKEASYQEGDHLGVIPRNYEGIVNRVTARFGLSASQQIRLEAEEEKLAHLPLAKTVSVEELLQYVELQDPVTRTQLRAMAAKTVCPPHKVELEALLEKQAYKEQVLAKRLTMLELLEKYPACEMKFSEFIALLPSIRPRYYSISSSPRVDEKQASITVSVVSGPAWSGYGEYKGIASNYLAELQEGDTITCFISTDQSEFTLPKDPETPLIMVGPGTGVAPFRGFVQARKQLKEQGQSLGEAHLYFGCRSPHEDYLYQEELENAQSEGIITLHTAFSRMPNQPKTYVQHVMEQDGKKLIELLDQGAHFYICGDGSQMAPAVEATLMKSYADVHQVSEADARLWLQQLEEKGRYAKDVWAG

SEQ ID NO: 589 - DNA, 3147 bp, synthetic construct
  misc_feature 1..3147: note = Variant of cytochrome P450
  source 1..3147: mol_type = other DNA
atgacaattaaggaaatgcctcagcctaagacgtttggagaacttaaaaatttaccgttattaaacacagataaaccggttcaagctttgatgcgtattgcggatgaattaggagaaatctttaaattcgaggcgcctggtagcgtaacgcgctttttatcaagtcagcgtctaattaaagaagcatgcgatgaatcacgctttgataaaaacttaagtcaaggccttaaatttgcacgtgattttcttggagacgggttatttacaagctggacgcatgaaccgaattggaaaaaagcgcataatatcttaggcccaagctttagtcagcgtgcaatgaaacgttatcatgcgatgatggtcgatatcgccgtgcagcttgttcaaaagtgggagcgtctaaatgcagatgagcatattgaagtatcggaagacatgacacgtttaacgctggatacaattggtctttgcggcttcaactatcgctttaacagcttttaccgagatcagcctcatccatttattgtgagtgttgagggtgcactggatgaagtaatgaacaagctgcagcgagcaaatccagacgacccagcttatgatgaaaacaagcgccagtgtcaagaagacatcaaggtgatgaacgactatgtcgataaaattattgcagatcgcaaagcaaggggtgaacaaagccatgatttattaacgcagatgctaaacggaaaagatccagaaacgggtgagccgcttgatgacgggaacattcgttatcaaattattacattcttaattgcgggacacgaaacaacaagtggtcttttatcatttgcgctgtatttcttagtgaaaaatccacatgtattacaaaaagtagcagaagaagcagcacgagttctagtagatcctgttccaagctacaaacaagtcaaacagcttaaatatgtcggcatggtcttaaacgaagcgctgcgcttatggccaactgctcctgcgttttccctatatgcaaaagaagatacggtgcttggaggagaatatcctttaaccaaaggcgacgaagtaatggttctgattcctcagcttcaccgtgataaaacaatttggggagacgatgtggaggagttccgtccagagcgttttgaaaatccaagtgcgattccgcagcatgcgtttaaaccgtttggaaacggtcagcgtgcgtgtatcggtcagcagttcgctcttcatgaagcaacgctggtacttggtatgatgctaaaacactttgactttgaagatcatacaaactacgagctcgttattaaagaaaagttaacgttaaaacctgaaggctttgtggtaaaagcaaaatcgaaaggcattccgcttggcggtattccttcacctagcactgaacagtctgctaaaaaagtacgcaaaaaggcagaaaacgctcataatacgccgctgcttgtgctatacggttcaaatgcgggaacagctgaaggaacggcgcgtgatttagcagatattgcaatgagcaaaggatttgcaccgcaggtcgcaacgcttgattcacacgccggaaatcttccgcgcgaaggagctgtattaattgtaacggcgtcttataacggtcatccgcctgataacgcaaagcaatttgtcgactggttagaccaagcgtctgctgatgaagtaaaaggcgttcgctactccgtatttggatgcggcgataaaaactgggctgcgacgtatcaaaaagtgcctgcttttatcgatgaaacgcttgccgctaaaggggcagaaaacatcgctgaccgcggtgaagcagatgcaagcgacgactttgaaggcgcgtatgaagaatggagtgatcatatgtggagtgacgtagcagcctactttaacctcgacattgaaaacagtgaagataataaatctactctttcacttcaatttgtcgacagcgccgcggatatgccgcttgcgaaaatgcacggtgcgttttcaacgaacgtcgtagcaagcaaagaacttcaacagccaggcagtgcacgaagcacgcgacatcttgaaattgaacttccaaaagaagcttcttatcaagaaggagatcatttaggtgttattcctcgcaactatgaaggaatagtaaaccgtgtaacagcaaggttcggcctaagcgcatcacagcaaatccgtctggaagcagaagaagaaaaattagctcatttgccactcgctaaaacagtatccgtagaagagcttctgcaatacgtggagcttcaagatcctgttacgcgcacgcagcttcgcgcaatggctgctaaaacggtctgcccgccgcataaagtagagcttgaagccttgcttgaaaagcaagcctacaaagaacaagtgctggcaaaacgtttaacaatgcttgaactgcttgaaaaatacccggcgtgtgaaatgaaattcagcgaatttatcgcccttctgccaagcatacgcccgcgctattactcgatttcttcatcacctcgtgtcgatgaaaaacaagcaagcatcacggtcagcgttgtctcaggaccggcgtggagcggatatggagaatataaaggaattgcgtcgaactatcttgccgagctgcaagaaggagatacgattacgtgctttatttccacagatcagtcagaatttacgctgccaaaagaccctgaaacgccgcttatcatggtcggaccgggaacaggcgtcgcgccgtttagaggctttgtgcaggcgcgcaaacagctaaaagaacaaggacagtcacttggagaagcacatttatacttcggctgccgttcacctcatgaagactatctgtatcaagaagagcttgaaaacgcccaaagcgaaggcatcattacgcttcataccgctttttctcgcatgccaaatcagccgaaaacatacgttcagcacgtaatggaacaagacggcaagaaattgattgaacttcttgatcaaggagcgcacttctatatttgcggagacggaagccaaatggcacctgccgttgaagcaacgcttatgaaaagctatgctgacgttcaccaagtgagtgaagcagacgctcgcttatggctgcagcagctagaagaaaaaggccgatacgcaaaagacgtgtgggctggg

SEQ ID NO: 590 - protein, 1049 aa, synthetic construct
  REGION 1..1049: note = Variant of cytochrome P450
MTIKEMPQPKTFGELKNLPLLNTDKPVQALMRIADELGEIFKFEAPGSVTRFLSSQRLIKEACDESRFDKNLSQGLKFARDFLGDGLFTSWTHEPNWKKAHNILGPSFSQRAMKRYHAMMVDIAVQLVQKWERLNADEHIEVSEDMTRLTLDTIGLCGFNYRFNSFYRDQPHPFIVSVEGALDEVMNKLQRANPDDPAYDENKRQCQEDIKVMNDYVDKIIADRKARGEQSHDLLTQMLNGKDPETGEPLDDGNIRYQIITFLIAGHETTSGLLSFALYFLVKNPHVLQKVAEEAARVLVDPVPSYKQVKQLKYVGMVLNEALRLWPTAPAFSLYAKEDTVLGGEYPLTKGDEVMVLIPQLHRDKTIWGDDVEEFRPERFENPSAIPQHAFKPFGNGQRACIGQQFALHEATLVLGMMLKHFDFEDHTNYELVIKEKLTLKPEGFVVKAKSKGIPLGGIPSPSTEQSAKKVRKKAENAHNTPLLVLYGSNAGTAEGTARDLADIAMSKGFAPQVATLDSHAGNLPREGAVLIVTASYNGHPPDNAKQFVDWLDQASADEVKGVRYSVFGCGDKNWAATYQKVPAFIDETLAAKGAENIADRGEADASDDFEGAYEEWSDHMWSDVAAYFNLDIENSEDNKSTLSLQFVDSAADMPLAKMHGAFSTNVVASKELQQPGSARSTRHLEIELPKEASYQEGDHLGVIPRNYEGIVNRVTARFGLSASQQIRLEAEEEKLAHLPLAKTVSVEELLQYVELQDPVTRTQLRAMAAKTVCPPHKVELEALLEKQAYKEQVLAKRLTMLELLEKYPACEMKFSEFIALLPSIRPRYYSISSSPRVDEKQASITVSVVSGPAWSGYGEYKGIASNYLAELQEGDTITCFISTDQSEFTLPKDPETPLIMVGPGTGVAPFRGFVQARKQLKEQGQSLGEAHLYFGCRSPHEDYLYQEELENAQSEGIITLHTAFSRMPNQPKTYVQHVMEQDGKKLIELLDQGAHFYICGDGSQMAPAVEATLMKSYADVHQVSEADARLWLQQLEEKGRYAKDVWAG

SEQ ID NO: 591 - DNA, 3147 bp, synthetic construct
  misc_feature 1..3147: note = Variant of cytochrome P450
  source 1..3147: mol_type = other DNA
atgacaattaaggaaatgcctcagcctaagacgtttggagaacttaaaaatttaccgttattaaacacagataaaccggttcaagctttgatgcgtattgcggatgaattaggagaaatctttaaattcgaggcgcctggtagcgtaacgcgctttttatcaagtcagcgtctaattaaagaagcatgcgatgaaagtcgctttgataaaaacttaagtcaaggccttaaatttgcacgtgattttcttggagacgggttatttacaagctggacgcatgaaccgaattggaaaaaagcgcataatatcttaggcccaagctttagtcagcgtgcaatgaaacgttatcatgcgatgatggtcgatatcgccgtgcagcttgttcaaaagtgggagcgtctaaatgcagatgagcatattgaagtatcggaagacatgacacgtttaacgctggatacaattggtctttgcggcttcaactatcgctttaacagcttttaccgagatcagcctcatccatttattgtgagtgttgagcgtgcactggatgaagtaatgaacaagctgcagcgagcaaatccagacgacccagcttatgatgaaaacaagcgccagtgtcaagaagatatcaaggtgatgaacgactatgtcgataaaattattgcagatcgcaaagcaaggggtgaacaaagccatgatttattaacgcagatgctaaacggaaaagatccagaaacgggtgagccgcttgatgacgggaacattcgttatcaaattattacattcttaattgcgggacacgaaacaacaagtggtcttttatcatttgcgctgtatttcttagtgaaaaatccacatgtattacaaaaagtagcagaagaagcagcacgagttctagtagatcctgttccaagctacaaacaagtcaaacagcttaaatatgtcggcatggtcttaaacgaagcgctgcgcttatggccaactgctcctgcgttttccctatatgcaaaagaagatacggtgcttggaggagaatatcctttaaccaaaggcgacgaagtaatggttctgattcctcagcttcaccgtgataaaacaatttggggagacgatgtggaggagttccgtccagagcgttttgaaaatccaagtgcgattccgcagcatgcgtttaaaccgtttggaaacggtcagcgtgcgtgtatcggtctgcagttcgctcttcatgaagcaacgctggtacttggtatgatgctaaaacactttgactttgaagatcatacaaactacgagctcgttattaaagaaaatttaacgttaaaacctgaaggctttgtggtaaaagcaaaatcgaaaggcattccgcttggcctgattccttcacctagcactgaacagtctgctaaaaaagtacgcaaaaaggcagaaaacgctcataatacgccgctgcttgtgctatacggttcaaatgcgggaacagctgaaggaacggcgcgtgatttagcagatattgcaatgagcaaaggatttgcaccgcaggtcgcaacgcttgattcacacgccggaaatcttccgcgcgaaggagctgtattaattgtaacggcgtcttataacggtcatccgcctgataacgcaaagcaatttgtcgactggttagaccaagcgtctgctgatgaagtaaaaggcgttcgctactccgtatttggatgcggcgataaaaactgggctgcgacgtatcaaaaagtgcctgcttttatcgatgaaacgcttgccgctaaaggggcagaaaacatcgctgaccgcggtgaagcagatgcaagcgacgactttgaaggcgcgtatgaagaatggagtgatcatatgtggagtgacgtagcagcctactttaacctcgacattgaaaacagtgaagataataaatctactctttcacttcaatttgtcgacagcgccgcggatatgccgcttgcgaaaatgcacggtgcgttttcaacgaacgtcgtagcaagcaaagaacttcaacagccaggcagtgcacgaagcacgcgacatcttgaaattgaacttccaaaagaagcttcttatcaagaaggagatcatttaggtgttattcctcgcaactatgaaggaatagtaaaccgtgtaacagcaaggttcggcctaagcgcatcacagcaaatccgtctggaagcagaagaagaaaaattagctcatttgccactcgctaaaacagtatccgtagaagagcttctgcaatacgtggagcttcaagatcctgttacgcgcacgcagcttcgcgcaatggctgctaaaacggtctgcccgccgcataaagtagagcttgaagccttgcttgaaaagcaagcctacaaagaacaagtgctggcaaaacgtttaacaatgcttgaactgcttgaaaaatacccggcgtgtgaaatgaaattcagcgaatttatcgcccttctgccaagcatacgcccgcgctattactcgatttcttcatcacctcgtgtcgatgaaaaacaagcaagcatcacggtcagcgttgtctcaggaccggcgtggagcggatatggagaatataaaggaattgcgtcgaactatcttgccgagctgcaagaaggagatacgattacgtgctttatttccacagatcagtcagaatttacgctgccaaaagaccctgaaacgccgcttatcatggtcggaccgggaacaggcgtcgcgccgtttagaggctttgtgcaggcgcgcaaacagctaaaagaacaaggacagtcacttggagaagcacatttatacttcggctgccgttcacctcatgaagactatctgtatcaagaagagcttgaaaacgcccaaagcgaaggcatcattacgcttcataccgctttttctcgcatgccaaatcagccgaaaacatacgttcagcacgtaatggaacaagacggcaagaaattgattgaacttcttgatcaaggagcgcacttctatatttgcggagacggaagccaaatggcacctgccgttgaagcaacgcttatgaaaagctatgctgacgttcaccaagtgagtgaagcagacgctcgcttatggctgcagcagctagaagaaaaaggccgatacgcaaaagacgtgtgggctggg

SEQ ID NO: 592 - protein, 1049 aa, synthetic construct
  REGION 1..1049: note = Variant of cytochrome P450
MTIKEMPQPKTFGELKNLPLLNTDKPVQALMRIADELGEIFKFEAPGSVTRFLSSQRLIKEACDESRFDKNLSQGLKFARDFLGDGLFTSWTHEPNWKKAHNILGPSFSQRAMKRYHAMMVDIAVQLVQKWERLNADEHIEVSEDMTRLTLDTIGLCGFNYRFNSFYRDQPHPFIVSVERALDEVMNKLQRANPDDPAYDENKRQCQEDIKVMNDYVDKIIADRKARGEQSHDLLTQMLNGKDPETGEPLDDGNIRYQIITFLIAGHETTSGLLSFALYFLVKNPHVLQKVAEEAARVLVDPVPSYKQVKQLKYVGMVLNEALRLWPTAPAFSLYAKEDTVLGGEYPLTKGDEVMVLIPQLHRDKTIWGDDVEEFRPERFENPSAIPQHAFKPFGNGQRACIGLQFALHEATLVLGMMLKHFDFEDHTNYELVIKENLTLKPEGFVVKAKSKGIPLGLIPSPSTEQSAKKVRKKAENAHNTPLLVLYGSNAGTAEGTARDLADIAMSKGFAPQVATLDSHAGNLPREGAVLIVTASYNGHPPDNAKQFVDWLDQASADEVKGVRYSVFGCGDKNWAATYQKVPAFIDETLAAKGAENIADRGEADASDDFEGAYEEWSDHMWSDVAAYFNLDIENSEDNKSTLSLQFVDSAADMPLAKMHGAFSTNVVASKELQQPGSARSTRHLEIELPKEASYQEGDHLGVIPRNYEGIVNRVTARFGLSASQQIRLEAEEEKLAHLPLAKTVSVEELLQYVELQDPVTRTQLRAMAAKTVCPPHKVELEALLEKQAYKEQVLAKRLTMLELLEKYPACEMKFSEFIALLPSIRPRYYSISSSPRVDEKQASITVSVVSGPAWSGYGEYKGIASNYLAELQEGDTITCFISTDQSEFTLPKDPETPLIMVGPGTGVAPFRGFVQARKQLKEQGQSLGEAHLYFGCRSPHEDYLYQEELENAQSEGIITLHTAFSRMPNQPKTYVQHVMEQDGKKLIELLDQGAHFYICGDGSQMAPAVEATLMKSYADVHQVSEADARLWLQQLEEKGRYAKDVWAG

SEQ ID NO: 593 - DNA, 3147 bp, synthetic construct
  misc_feature 1..3147: note = Variant of cytochrome P450
  source 1..3147: mol_type = other DNA
atgacaattaaggaaatgcctcagcctaagacgtttggagaacttaaaaatttaccgttattaaacacagataaaccggttcaagctttgatgcgtattgcggatgaattaggagaaatctttaaattcgaggcgcctggtagcgtaacgcgctttttatcaagtcagcgtctaattaaagaagcatgcgatgaatcacgctttgataaaaacttaagtcaaggccttaaatttgcacgtgattttcttggagacgggttatttacaagctggacgcatgaaccgaattggaaaaaagcgcataatatcttaggcccaagctttagtcagcgtgcaatgaaacgttatcatgcgatgatggtcgatatcgccgtgcagcttgttcaaaagtgggagcgtctaaatgcagatgagcatattgaagtatcggaagacatgacacgtttaacgctggatacaattggtctttgcggcttcaactatcgctttaacagcttttaccgagatcagcctcatccatttattgtgagtgttgagcgtgcactggatgaagtaatgaacaagctgcagcgagcaaatccagacgacccagcttatgatgaaaacaagcgccagtgtcaagaagatatcaaggtgatgaacgactatgtcgataaaattattgcagatcgcaaagcaaggggtgaacaaagccatgatttattaacgcagatgctaaacggaaaagatccagaaacgggtgagccgcttgatgacgggaacattcgttatcaaattattacattcttaattgcgggacacgaaacaacaagtggtcttttatcatttgcgctgtatttcttagtgaaaaatccacatgtattacaaaaagtagcagaagaagcagcacgagttctagtagatcctgttccaagctacaaacaagtcaaacagcttaaatatgtcggcatggtcttaaacgaagcgctgcgcttatggccaactgctcctgcgttttccctatatgcaaaagaagatacggtgcttggaggagaatatcctttaaccaaaggcgacgaagtaatggttctgattcctcagcttcaccgtgataaaacaatttggggagacgatgtggaggagttccgtccagagcgttttgaaaatccaagtgcgattccgcagcatgcgtttaaaccgtttggaaacggtcagcgtgcgtgtatcggtcagcagttcgctcttcatgaagcaacgctggtacttggtatgatgctaaaacactttgactttgaagatcatacaaactacgagctcgttattaaagaaaagttaacgttaaaacctgaaggctttgtggtaaaagcaaaatcgaaaggcattccgcttggcggtattccttcacctagcactgaacagtctgctaaaaaagtacgcaaaaaggcagaaaacgctcataatacgccgctgcttgtgctatacggttcaaatgcgggaacagctgaaggaacggcgcgtgatttagcagatattgcaatgagcaaaggatttgcaccgcaggtcgcaacgcttgattcacacgccggaaatcttccgcgcgaaggagctttgttaattgtaacggcgtcttataacggtcatccgcctgataacgcaaagcaatttgtcgactggttagaccaagcgtctgctgatgaagtaaaaggcgttcgctactccgtatttggatgcggcgataaaaactgggctgcgacgtatcaaaaagtgcctgcttttatcgatgaaacgcttgccgctaaaggggcagaaaacatcgctgaccgcggtgaagcagatgcaagcgacgactttgaaggcacatatgaagaatggagtgatcatatgtggagtgacgtagcagcctactttaacctcgacattgaaaacagtgaagataataaatctactctttcacttcaatttgtcgacagcgccgcggatatgccgcttgcgaaaatgcacggtgcgttttcaacgaacgtcgtagcaagcaaagaacttcaacagccaggcagtgcacgaagcacgcgacatcttgaaattgaacttccaaaagaagcttcttatcaagaaggagatcatttaggtgttattcctcgcaactatgaaggaatagtaaaccgtgtaacagcaaggttcggcctaagcgcatcacagcaaatccgtctggaagcagaagaagaaaaattagctcatttgccactcgctaaaacagtatccgtagaagagcttctgcaatacgtggagcttcaagatcctgttacgcgcacgcagcttcgcgcaatggctgctaaaacggtctgcccgccgcataaagtagagcttgaagccttgcttgaaaagcaagcctacaaagaacaagtgctggcaaaacgtttaacaatgcttgaactgcttgaaaaatacccggcgtgtgaaatgaaattcagcgaatttatcgcccttctgccaagcatacgcccgcgctattactcgatttcttcatcacctcgtgtcgatgaaaaacaagcaagcatcacggtcagcgttgtctcaggaccggcgtggagcggatatggagaatataaaggaattgcgtcgaactatcttgccgagctgcaagaaggagatacgattacgtgctttatttccacagatcagtcagaatttacgctgccaaaagaccctgaaacgccgcttatcatggtcggaccgggaacaggcgtcgcgccgtttagaggctttgtgcaggcgcgcaaacagctaaaagaacaaggacagtcacttggagaagcacatttatacttcggctgccgttcacctcatgaagactatctgtatcaagaagagcttgaaaacgcccaaagcgaaggcatcattacgcttcataccgctttttctcgcatgccaaatcagccgaaaacatacgttcagcacgtaatggaacaagacggcaagaaattgattgaacttcttgatcaaggagcgcacttctatatttgcggagacggaagccaaatggcacctgccgttgaagcaacgcttatgaaaagctatgctgacgttcaccaagtgagtgaagcagacgctcgcttatggctgcagcagctagaagaaaaaggccgatacgcaaaagacgtgtgggctggg

SEQ ID NO: 594 - protein, 1049 aa, synthetic construct
  REGION 1..1049: note = Variant of cytochrome P450
MTIKEMPQPKTFGELKNLPLLNTDKPVQALMRIADELGEIFKFEAPGSVTRFLSSQRLIKEACDESRFDKNLSQGLKFARDFLGDGLFTSWTHEPNWKKAHNILGPSFSQRAMKRYHAMMVDIAVQLVQKWERLNADEHIEVSEDMTRLTLDTIGLCGFNYRFNSFYRDQPHPFIVSVERALDEVMNKLQRANPDDPAYDENKRQCQEDIKVMNDYVDKIIADRKARGEQSHDLLTQMLNGKDPETGEPLDDGNIRYQIITFLIAGHETTSGLLSFALYFLVKNPHVLQKVAEEAARVLVDPVPSYKQVKQLKYVGMVLNEALRLWPTAPAFSLYAKEDTVLGGEYPLTKGDEVMVLIPQLHRDKTIWGDDVEEFRPERFENPSAIPQHAFKPFGNGQRACIGQQFALHEATLVLGMMLKHFDFEDHTNYELVIKEKLTLKPEGFVVKAKSKGIPLGGIPSPSTEQSAKKVRKKAENAHNTPLLVLYGSNAGTAEGTARDLADIAMSKGFAPQVATLDSHAGNLPREGALLIVTASYNGHPPDNAKQFVDWLDQASADEVKGVRYSVFGCGDKNWAATYQKVPAFIDETLAAKGAENIADRGEADASDDFEGTYEEWSDHMWSDVAAYFNLDIENSEDNKSTLSLQFVDSAADMPLAKMHGAFSTNVVASKELQQPGSARSTRHLEIELPKEASYQEGDHLGVIPRNYEGIVNRVTARFGLSASQQIRLEAEEEKLAHLPLAKTVSVEELLQYVELQDPVTRTQLRAMAAKTVCPPHKVELEALLEKQAYKEQVLAKRLTMLELLEKYPACEMKFSEFIALLPSIRPRYYSISSSPRVDEKQASITVSVVSGPAWSGYGEYKGIASNYLAELQEGDTITCFISTDQSEFTLPKDPETPLIMVGPGTGVAPFRGFVQARKQLKEQGQSLGEAHLYFGCRSPHEDYLYQEELENAQSEGIITLHTAFSRMPNQPKTYVQHVMEQDGKKLIELLDQGAHFYICGDGSQMAPAVEATLMKSYADVHQVSEADARLWLQQLEEKGRYAKDVWAG

SEQ ID NO: 595 - DNA, 3147 bp, synthetic construct
  misc_feature 1..3147: note = Variant of cytochrome P450
  source 1..3147: mol_type = other DNA
atgacaattaaggaaatgcctcagcctaagacgtttggagaacttaaaaatttaccgttattaaacacagataaaccggttcaagctttgatgcgtattgcggatgaattaggagaaatctttaaattcgaggcgcctggtagcgtaacgcgctttttatcaagtcagcgtctaattaaagaagcatgcgatgaatcacgctttgataaaaacttaagtcaaggccttaaatttgcacgtgattttcttggagacgggttatttacaagctggacgcatgaaccgaattggaaaaaagcgcataatatcttaggcccaagctttagtcagcgtgcaatgaaacgttatcatgcgatgatggtcgatatcgccgtgcagcttgttcaaaagtgggagcgtctaaatgcagatgagcatattgaagtatcggaagacatgacacgtttaacgctggatacaattggtctttgcggcttcaactatcgctttaacagcttttaccgagatcagcctcatccatttattgtgagtgttgagcgtgcactggatgaagtaatgaacaagctgcagcgagcaaatccagacgacccagcttatgatgaaaacaagcgccagtgtcaagaagatatcaaggtgatgaacgactatgtcgataaaattattgcagatcgcaaagcaaggggtgaacaaagccatgatttattaacgcagatgctaaacggaaaagatccagaaacgggtgagccgcttgatgacgggaacattcgttatcaaattattacattcttaattgcgggacacgaaacaacaagtggtcttttatcatttgcgctgtatttcttagtgaaaaatccacatgtattacaaaaagtagcagaagaagcagcacgagttctagtagatcctgttccaagctacaaacaagtcaaacagcttaaatatgtcggcatggtcttaaacgaagcgctgcgcttatggccaactgctcctgcgttttccctatatgcaaaagaagatacggtgcttggaggagaatatcctttaaccaaaggcgacgaagtaatggttctgattcctcagcttcaccgtgataaaacaatttggggagacgatgtggaggagttccgtccagagcgttttgaaaatccaagtgcgattccgcagcatgcgtttaaaccgtttggaaacggtcagcgtgcgtgtatcggtcagcagttcgctcttcatgaagcaacgctggtacttggtatgatgctaaaacactttgactttgaagatcatacaaactacgagctcgttattaaagaaaagttaacgttaaaacctgaaggctttgtggtaaaagcaaaatcgaaaggcattccgcttggcggtattccttcacctagcactgaacagtctgctaaaaaagtacgcaaaaaggcagaaaacgctcataatacgccgctgcttgtgctatacggttcaaatgcgggaacagctgaaggaacggcgcgtgatttagcagatattgcaatgagcaaaggatttgcaccgcaggtcgcaacgcttgattcacacgccggaaatcttccgcgcgaaggagctgtattaattgtaacggcgtcttataacggtcatccgcctgataacgcaaaggagtttgtcgactggttagaccaagcgtctgctgatgaagtaaaaggcgttcgctactccgtatttggatgcggcgataaaaactgggctgcgacgtatcaaaaagtgcctgcttttatcgatgaaacgcttgccgctaaaggggcagaaaacatcgctgaccgcggtgaagcagatgcaagcgacgactttgaaggcacatatgaagaatggagtgatcatatgtggagtgacgtagcagcctactttaacctcgacattgaaaacagtgaagataataaatctactctttcacttcaatttgtcgacagcgccgcggatatgccgcttgcgaaaatgcacggtgcgttttcaacgaacgtcgtagcaagcaaagaacttcaacagccaggcagtgcacgaagcacgcgacatcttgaaattgaacttccaaaagaagcttcttatcaagaaggagatcatttaggtgttattcctcgcaactatgaaggaatagtaaaccgtgtaacagcaaggttcggcctaagcgcatcacagcaaatccgtctggaagcagaagaagaaaaattagctcatttgccactcgctaaaacagtatccgtagaagagcttctgcaatacgtggagcttcaagatcctgttacgcgcacgcagcttcgcgcaatggctgctaaaacggtctgcccgccgcataaagtagagcttgaagccttgcttgaaaagcaagcctacaaagaacaagtgctggcaaaacgtttaacaatgcttgaactgcttgaaaaatacccggcgtgtgaaatgaaattcagcgaatttatcgcccttctgccaagcatacgcccgcgctattactcgatttcttcatcacctcgtgtcgatgaaaaacaagcaagcatcacggtcagcgttgtctcaggaccggcgtggagcggatatggagaatataaaggaattgcgtcgaactatcttgccgagctgcaagaaggagatacgattacgtgctttatttccacagatcagtcagaatttacgctgccaaaagaccctgaaacgccgcttatcatggtcggaccgggaacaggcgtcgcgccgtttagaggctttgtgcaggcgcgcaaacagctaaaagaacaaggacagtcacttggagaagcacatttatacttcggctgccgttcacctcatgaagactatctgtatcaagaagagcttgaaaacgcccaaagcgaaggcatcattacgcttcataccgctttttctcgcatgccaaatcagccgaaaacatacgttcagcacgtaatggaacaagacggcaagaaattgattgaacttcttgatcaaggagcgcacttctatatttgcggagacggaagccaaatggcacctgccgttgaagcaacgcttatgaaaagctatgctgacgttcaccaagtgagtgaagcagacgctcgcttatggctgcagcagctagaagaaaaaggccgatacgcaaaagacgtgtgggctggg

SEQ ID NO: 596 - protein, 1049 aa, synthetic construct
  REGION 1..1049: note = Variant of cytochrome P450
MTIKEMPQPKTFGELKNLPLLNTDKPVQALMRIADELGEIFKFEAPGSVTRFLSSQRLIKEACDESRFDKNLSQGLKFARDFLGDGLFTSWTHEPNWKKAHNILGPSFSQRAMKRYHAMMVDIAVQLVQKWERLNADEHIEVSEDMTRLTLDTIGLCGFNYRFNSFYRDQPHPFIVSVERALDEVMNKLQRANPDDPAYDENKRQCQEDIKVMNDYVDKIIADRKARGEQSHDLLTQMLNGKDPETGEPLDDGNIRYQIITFLIAGHETTSGLLSFALYFLVKNPHVLQKVAEEAARVLVDPVPSYKQVKQLKYVGMVLNEALRLWPTAPAFSLYAKEDTVLGGEYPLTKGDEVMVLIPQLHRDKTIWGDDVEEFRPERFENPSAIPQHAFKPFGNGQRACIGQQFALHEATLVLGMMLKHFDFEDHTNYELVIKEKLTLKPEGFVVKAKSKGIPLGGIPSPSTEQSAKKVRKKAENAHNTPLLVLYGSNAGTAEGTARDLADIAMSKGFAPQVATLDSHAGNLPREGAVLIVTASYNGHPPDNAKEFVDWLDQASADEVKGVRYSVFGCGDKNWAATYQKVPAFIDETLAAKGAENIADRGEADASDDFEGTYEEWSDHMWSDVAAYFNLDIENSEDNKSTLSLQFVDSAADMPLAKMHGAFSTNVVASKELQQPGSARSTRHLEIELPKEASYQEGDHLGVIPRNYEGIVNRVTARFGLSASQQIRLEAEEEKLAHLPLAKTVSVEELLQYVELQDPVTRTQLRAMAAKTVCPPHKVELEALLEKQAYKEQVLAKRLTMLELLEKYPACEMKFSEFIALLPSIRPRYYSISSSPRVDEKQASITVSVVSGPAWSGYGEYKGIASNYLAELQEGDTITCFISTDQSEFTLPKDPETPLIMVGPGTGVAPFRGFVQARKQLKEQGQSLGEAHLYFGCRSPHEDYLYQEELENAQSEGIITLHTAFSRMPNQPKTYVQHVMEQDGKKLIELLDQGAHFYICGDGSQMAPAVEATLMKSYADVHQVSEADARLWLQQLEEKGRYAKDVWAG

SEQ ID NO: 597 - DNA, 3147 bp, synthetic construct
  misc_feature 1..3147: note = Variant of cytochrome P450
  source 1..3147: mol_type = other DNA
atgacaattaaggaaatgcctcagcctaagacgtttggagaacttaaaaatttaccgttattaaacacagataaaccggttcaagctttgatgcgtattgcggatgaattaggagaaatctttaaattcgaggcgcctggtagcgtaacgcgctttttatcaagtcagcgtctaattaaagaagcatgcgatgaatcacgctttgataaaaacttaagtcaaggccttaaatttgcacgtgattttcttggagacgggttatttacaagctggacgcatgaaccgaattggaaaaaagcgcataatatcttaggcccaagctttagtcagcgtgcaatgaaacgttatcatgcgatgatggtcgatatcgccgtgcagcttgttcaaaagtgggagcgtctaaatgcagatgagcatattgaagtatcggaagacatgacacgtttaacgctggatacaattggtctttgcggcttcaactatcgctttaacagcttttaccgagatcagcctcatccatttattgtgagtgttgagcgtgcactggatgaagtaatgaacaagctgcagcgagcaaatccagacgacccagcttatgatgaaaacaagcgccagtgtcaagaagatatcaaggtgatgaacgactatgtcgataaaattattgcagatcgcaaagcaaggggtgaacaaagccatgatttattaacgcagatgctaaacggaaaagatccagaaacgggtgagccgcttgatgacgggaacattcgttatcaaattattacattcttaattgcgggacacgaaacaacaagtggtcttttatcatttgcgctgtatttcttagtgaaaaatccacatgtattacaaaaagtagcagaagaagcagcacgagttctagtagatcctgttccaagctacaaacaagtcaaacagcttaaatatgtcggcatggtcttaaacgaagcgctgcgcttatggccaactgctcctgcgttttccctatatgcaaaagaagatacggtgcttggaggagaatatcctttaaccaaaggcgacgaagtaatggttctgattcctcagcttcaccgtgataaaacaatttggggagacgatgtggaggagttccgtccagagcgttttgaaaatccaagtgcgattccgcagcatgcgtttaaaccgtttggaaacggtcagcgtgcgtgtatcggtcagcagttcgctcttcatgaagcatgtctggtacttggtatgatgctaaaacactttgactttgaagatcatacaaactacgagctcgttattaaagaaaagttaacgttaaaacctgaaggctttgtggtaaaagcaaaatcgaaaggcattccgcttggcggtattccttcacctagcactgaacagtctgctaaaaaagtacgcaaaaaggcagaaaacgctcataatacgccgctgcttgtgctatacggttcaaatgcgggaacagctgaaggaacggcgcgtgatttagcagatattgcaatgagcaaaggatttgcaccgcaggtcgcaacgcttgattcacacgccggaaatcttccgcgcgaaggagctgtattaattgtaacggcgtcttataacggtcatccgcctgataacgcaaagcaatttgtcgactggttagaccaagcgtctgctgatgaagtaaaaggcgttcgctactccgtatttggatgcggcgataaaaactgggctgcgacgtatcaaaaagtgcctgcttttatcgatgaaacgcttgccgctaaaggggcagaaaacatcgctgaccgcggtgaagcagatgcaagcgacgactttgaaggcacatatgaagaatggagtgatcatatgtggagtgacgtagcagcctactttaacctcgacattgaaaacagtgaagataataaatctactctttcacttcaatttgtcgacagcgccgcggatatgccgcttgcgaaaatgcacggtgcgttttcaacgaacgtcgtagcaagcaaagaacttcaacagccaggcagtgcacgaagcacgcgacatcttgaaattgaacttccaaaagaagcttcttatcaagaaggagatcatttaggtgttattcctcgcaactatgaaggaatagtaaaccgtgtaacagcaaggttcggcctaagcgcatcacagcaaatccgtctggaagcagaagaagaaaaattagctcatttgccactcgctaaaacagtatccgtagaagagcttctgcaatacgtggagcttcaagatcctgttacgcgcacgcagcttcgcgcaatggctgctaaaacggtctgcccgccgcataaagtagagcttgaagccttgcttgaaaagcaagcctacaaagaacaagtgctggcaaaacgtttaacaatgcttgaactgcttgaaaaatacccggcgtgtgaaatgaaattcagcgaatttatcgcccttctgccaagcatacgcccgcgctattactcgatttcttcatcacctcgtgtcgatgaaaaacaagcaagcatcacggtcagcgttgtctcaggaccggcgtggagcggatatggagaatataaaggaattgcgtcgaactatcttgccgagctgcaagaaggagatacgattacgtgctttatttccacagatcagtcagaatttacgctgccaaaagaccctgaaacgccgcttatcatggtcggaccgggaacaggcgtcgcgccgtttagaggctttgtgcaggcgcgcaaacagctaaaagaacaaggacagtcacttggagaagcacatttatacttcggctgccgttcacctcatgaagactatctgtatcaagaagagcttgaaaacgcccaaagcgaaggcatcattacgcttcataccgctttttctcgcatgccaaatcagccgaaaacatacgttcagcacgtaatggaacaagacggcaagaaattgattgaacttcttgatcaaggagcgcacttctatatttgcggagacggaagccaaatggcacctgccgttgaagcaacgcttatgaaaagctatgctgacgttcaccaagtgagtgaagcagacgctcgcttatggctgcagcagctagaagaaaaaggccgatacgcaaaagacgtgtgggctggg

SEQ ID NO: 598 - protein, 1049 aa, synthetic construct
  REGION 1..1049: note = Variant of cytochrome P450
MTIKEMPQPKTFGELKNLPLLNTDKPVQALMRIADELGEIFKFEAPGSVTRFLSSQRLIKEACDESRFDKNLSQGLKFARDFLGDGLFTSWTHEPNWKKAHNILGPSFSQRAMKRYHAMMVDIAVQLVQKWERLNADEHIEVSEDMTRLTLDTIGLCGFNYRFNSFYRDQPHPFIVSVERALDEVMNKLQRANPDDPAYDENKRQCQEDIKVMNDYVDKIIADRKARGEQSHDLLTQMLNGKDPETGEPLDDGNIRYQIITFLIAGHETTSGLLSFALYFLVKNPHVLQKVAEEAARVLVDPVPSYKQVKQLKYVGMVLNEALRLWPTAPAFSLYAKEDTVLGGEYPLTKGDEVMVLIPQLHRDKTIWGDDVEEFRPERFENPSAIPQHAFKPFGNGQRACIGQQFALHEACLVLGMMLKHFDFEDHTNYELVIKEKLTLKPEGFVVKAKSKGIPLGGIPSPSTEQSAKKVRKKAENAHNTPLLVLYGSNAGTAEGTARDLADIAMSKGFAPQVATLDSHAGNLPREGAVLIVTASYNGHPPDNAKQFVDWLDQASADEVKGVRYSVFGCGDKNWAATYQKVPAFIDETLAAKGAENIADRGEADASDDFEGTYEEWSDHMWSDVAAYFNLDIENSEDNKSTLSLQFVDSAADMPLAKMHGAFSTNVVASKELQQPGSARSTRHLEIELPKEASYQEGDHLGVIPRNYEGIVNRVTARFGLSASQQIRLEAEEEKLAHLPLAKTVSVEELLQYVELQDPVTRTQLRAMAAKTVCPPHKVELEALLEKQAYKEQVLAKRLTMLELLEKYPACEMKFSEFIALLPSIRPRYYSISSSPRVDEKQASITVSVVSGPAWSGYGEYKGIASNYLAELQEGDTITCFISTDQSEFTLPKDPETPLIMVGPGTGVAPFRGFVQARKQLKEQGQSLGEAHLYFGCRSPHEDYLYQEELENAQSEGIITLHTAFSRMPNQPKTYVQHVMEQDGKKLIELLDQGAHFYICGDGSQMAPAVEATLMKSYADVHQVSEADARLWLQQLEEKGRYAKDVWAG

SEQ ID NO: 599 - DNA, 3147 bp, synthetic construct
  misc_feature 1..3147: note = Variant of cytochrome P450
  source 1..3147: mol_type = other DNA
atgacaattaaggaaatgcctcagcctaagacgtttggagaacttaaaaatttaccgttattaaacacagataaaccggttcaagctttgatgcgtattgcggatgaattaggagaaatctttaaattcgaggcgcctggtagcgtaacgcgctttttatcaagtcagcgtctaattaaagaagcatgcgatgaatcacgctttgataaaaacttaagtcaaggccttaaatttgcacgtgattttcttggagacgggttatttacaagctggacgcatgaaccgaattggaaaaaagcgcataatatcttaggcccaagctttagtcagcgtgcaatgaaacgttatcatgcgatgatggtcgatatcgccgtgcagcttgttcaaaagtgggagcgtctaaatgcagatgagcatattgaagtatcggaagacatgacacgtttaacgctggatacaattggtctttgcggcttcaactatcgctttaacagcttttaccgagatcagcctcatccatttattgtgagtgttgagcgtgcactggatgaagtaatgaacaagctgcagcgagcaaatccagacgacccagcttatgatgaaaacaagcgccagtgtcaagaagatatcaaggtgatgaacgactatgtcgataaaattattgcagatcgcaaagcaaggggtgaacaaagccatgatttattaacgcagatgctaaacggaaaagatccagaaacgggtgagccgcttgatgacgggaacattcgttatcaaattattacattcttaattgcgggacacgaaacaacaagtggtcttttatcatttgcgctgtatttcttagtgaaaaatccacatgtattacaaaaagtagcagaagaagcagcacgagttctagtagatcctgttccaagctacaaacaagtcaaacagcttaaatatgtcggcatggtcttaaacgaagcgctgcgcttatggccaactgctcctgcgttttccctatatgcaaaagaagatacggtgcttggaggagaatatcctttaaccaaaggcgacgaagtaatggttctgattcctcagcttcaccgtgataaaacaatttggggagacgatgtggaggagttccgtccagagcgttttgaaaatccaagtgcgattccgcagcatgcgtttaaaccgtttggaaacggtcagcgtgcgtgtatcggtcagcagttcgctcttcatgaagcaacgctggtacttggtatgatgctaaaacactttgactttgaagatcatacaaactacgagctcgttattaaagaaaagttaacgttaaaacctgaaggctttgtggtaaaagcaaaatcgaaaggcattccgcttggcggtattccttcacctagcactgaacagtctgctaaaaaagtacgcaaaaaggcagaaaacgctcataatacgccgctgcttgtgctatacggttcaaatgcgggaacagctgaaggaacggcgcgtgatttagcagatattgcaatgagcaaaggatttgcaccgcaggtcgcaacgcttgattcacacgccggaaatcttccgcgcgaaggagctgtattaattgtaacggcgtcttataacggtcatccgcctgataacgcaaaggcgtttgtcgactggttagaccaagcgtctgctgatgaagtaaaaggcgttcgctactccgtatttggatgcggcgataaaaactgggctgcgacgtatcaaaaagtgcctgcttttatcgatgaaacgcttgccgctaaaggggcagaaaacatcgctgaccgcggtgaagcagatgcaagcgacgactttgaaggcacatatgaagaatggagtgatcatatgtggagtgacgtagcagcctactttaacctcgacattgaaaacagtgaagataataaatctactctttcacttcaatttgtcgacagcgccgcggatatgccgcttgcgaaaatgcacggtgcgttttcaacgaacgtcgtagcaagcaaagaacttcaacagccaggcagtgcacgaagcacgcgacatcttgaaattgaacttccaaaagaagcttcttatcaagaaggagatcatttaggtgttattcctcgcaactatgaaggaatagtaaaccgtgtaacagcaaggttcggcctaagcgcatcacagcaaatccgtctggaagcagaagaagaaaaattagctcatttgccactcgctaaaacagtatccgtagaagagcttctgcaatacgtggagcttcaagatcctgttacgcgcacgcagcttcgcgcaatggctgctaaaacggtctgcccgccgcataaagtagagcttgaagccttgcttgaaaagcaagcctacaaagaacaagtgctggcaaaacgtttaacaatgcttgaactgcttgaaaaatacccggcgtgtgaaatgaaattcagcgaatttatcgcccttctgccaagcatacgcccgcgctattactcgatttcttcatcacctcgtgtcgatgaaaaacaagcaagcatcacggtcagcgttgtctcaggaccggcgtggagcggatatggagaatataaaggaattgcgtcgaactatcttgccgagctgcaagaaggagatacgattacgtgctttatttccacagatcagtcagaatttacgctgccaaaagaccctgaaacgccgcttatcatggtcggaccgggaacaggcgtcgcgccgtttagaggctttgtgcaggcgcgcaaacagctaaaagaacaaggacagtcacttggagaagcacatttatacttcggctgccgttcacctcatgaagactatctgtatcaagaagagcttgaaaacgcccaaagcgaaggcatcattacgcttcataccgctttttctcgcatgccaaatcagccgaaaacatacgttcagcacgtaatggaacaagacggcaagaaattgattgaacttcttgatcaaggagcgcacttctatatttgcggagacggaagccaaatggcacctgccgttgaagcaacgcttatgaaaagctatgctgacgttcaccaagtgagtgaagcagacgctcgcttatggctgcagcagctagaagaaaaaggccgatacgcaaaagacgtgtgggctggg

SEQ ID NO: 600 - protein, 1049 aa, synthetic construct
  REGION 1..1049: note = Variant of cytochrome P450
MTIKEMPQPKTFGELKNLPLLNTDKPVQALMRIADELGEIFKFEAPGSVTRFLSSQRLIKEACDESRFDKNLSQGLKFARDFLGDGLFTSWTHEPNWKKAHNILGPSFSQRAMKRYHAMMVDIAVQLVQKWERLNADEHIEVSEDMTRLTLDTIGLCGFNYRFNSFYRDQPHPFIVSVERALDEVMNKLQRANPDDPAYDENKRQCQEDIKVMNDYVDKIIADRKARGEQSHDLLTQMLNGKDPETGEPLDDGNIRYQIITFLIAGHETTSGLLSFALYFLVKNPHVLQKVAEEAARVLVDPVPSYKQVKQLKYVGMVLNEALRLWPTAPAFSLYAKEDTVLGGEYPLTKGDEVMVLIPQLHRDKTIWGDDVEEFRPERFENPSAIPQHAFKPFGNGQRACIGQQFALHEATLVLGMMLKHFDFEDHTNYELVIKEKLTLKPEGFVVKAKSKGIPLGGIPSPSTEQSAKKVRKKAENAHNTPLLVLYGSNAGTAEGTARDLADIAMSKGFAPQVATLDSHAGNLPREGAVLIVTASYNGHPPDNAKAFVDWLDQASADEVKGVRYSVFGCGDKNWAATYQKVPAFIDETLAAKGAENIADRGEADASDDFEGTYEEWSDHMWSDVAAYFNLDIENSEDNKSTLSLQFVDSAADMPLAKMHGAFSTNVVASKELQQPGSARSTRHLEIELPKEASYQEGDHLGVIPRNYEGIVNRVTARFGLSASQQIRLEAEEEKLAHLPLAKTVSVEELLQYVELQDPVTRTQLRAMAAKTVCPPHKVELEALLEKQAYKEQVLAKRLTMLELLEKYPACEMKFSEFIALLPSIRPRYYSISSSPRVDEKQASITVSVVSGPAWSGYGEYKGIASNYLAELQEGDTITCFISTDQSEFTLPKDPETPLIMVGPGTGVAPFRGFVQARKQLKEQGQSLGEAHLYFGCRSPHEDYLYQEELENAQSEGIITLHTAFSRMPNQPKTYVQHVMEQDGKKLIELLDQGAHFYICGDGSQMAPAVEATLMKSYADVHQVSEADARLWLQQLEEKGRYAKDVWAG

SEQ ID NO: 601 - DNA, 3147 bp, synthetic construct
  misc_feature 1..3147: note = Variant of cytochrome P450
  source 1..3147: mol_type = other DNA
atgacaattaaggaaatgcctcagcctaagacgtttggagaacttaaaaatttaccgttattaaacacagataaaccggttcaagctttgatgcgtattgcggatgaattaggagaaatctttaaattcgaggcgcctggtagcgtaacgcgctttttatcaagtcagcgtctaattaaagaagcatgcgatgaatcacgctttgataaaaacttaagtcaaggccttaaatttgcacgtgattttcttggagacgggttatttacaagctggacgcatgaaccgaattggaaaaaagcgcataatatcttaggcccaagctttagtcagctggcaatgaaacgttatcatgcgatgatggtcgatatcgccgtgcagcttgttcaaaagtgggagcgtctaaatgcagatgagcatattgaagtatcggaagacatgacacgtttaacgctggatacaattggtctttgcggcttcaactatcgctttaacagcttttaccgagatcagcctcatccatttattgtgagtgttgagcgtgcactggatgaagtaatgaacaagctgcagcgagcaaatccagacgacccagcttatgatgaaaacaagcgccagtgtcaagaagatatcaaggtgatgaacgactatgtcgataaaattattgcagatcgcaaagcaaggggtgaacaaagccatgatttattaacgcagatgctaaacggaaaagatccagaaacgggtgagccgcttgatgacgggaacattcgttatcaaattattacattcttaattgcgggacacgaaacaacaagtggtcttttatcatttgcgctgtatttcttagtgaaaaatccacatgtattacaaaaagtagcagaagaagcagcacgagttctagtagatcctgttccaagctacaaacaagtcaaacagcttaaatatgtcggcatggtcttaaacgaagcgctgcgcttatggccaactgctcctgcgttttccctatatgcaaaagaagatacggtgcttggaggagaatatcctttaaccaaaggcgacgaagtaatggttctgattcctcagcttcaccgtgataaaacaatttggggagacgatgtggaggagttccgtccagagcgttttgaaaatccaagtgcgattccgcagcatgcgtttaaaccgtttggaaacggtcagcgtgcgtgtatcggtcagcagttcgctcttcatgaagcaacgctggtacttggtatgatgctaaaacactttgactttgaagatcatacaaactacgagctcgttattaaagaaaagttaacgttaaaacctgaaggctttgtggtaaaagcaaaatcgaaaggcattccgcttggcggtattccttcacctagcactgaacagtctgctaaaaaagtacgcaaaaaggcagaaaacgctcataatacgccgctgcttgtgctatacggttcaaatgcgggaacagctgaaggaacggcgcgtgatttagcagatattgcaatgagcaaaggatttgcaccgcaggtcgcaacgcttgattcacacgccggaaatcttccgcgcgaaggagctgtattaattgtaacggcgtcttataacggtcatccgcctgataacgcaaagcaatttgtcgactggttagaccaagcgtctgctgatgaagtaaaaggcgttcgctactccgtatttggatgcggcgataaaaactgggctgcgacgtatcaaaaagtgcctgcttttatcgatgaaacgcttgccgctaaaggggcagaaaacatcgctgaccgcggtgaagcagatgcaagcgacgactttgaaggcacatatgaagaatggagtgatcatatgtggagtgacgtagcagcctactttaacctcgacattgaaaacagtgaagataataaatctactctttcacttcaatttgtcgacagcgccgcggatatgccgcttgcgaaaatgcacggtgcgttttcaacgaacgtcgtagcaagcaaagaacttcaacagccaggcagtgcacgaagcacgcgacatcttgaaattgaacttccaaaagaagcttcttatcaagaaggagatcatttaggtgttattcctcgcaactatgaaggaatagtaaaccgtgtaacagcaaggttcggcctaagcgcatcacagcaaatccgtctggaagcagaagaagaaaaattagctcatttgccactcgctaaaacagtatccgtagaagagcttctgcaatacgtggagcttcaagatcctgttacgcgcacgcagcttcgcgcaatggctgctaaaacggtctgcccgccgcataaagtagagcttgaagccttgcttgaaaagcaagcctacaaagaacaagtgctggcaaaacgtttaacaatgcttgaactgcttgaaaaatacccggcgtgtgaaatgaaattcagcgaatttatcgcccttctgccaagcatacgcccgcgctattactcgatttcttcatcacctcgtgtcgatgaaaaacaagcaagcatcacggtcagcgttgtctcaggaccggcgtggagcggatatggagaatataaaggaattgcgtcgaactatcttgccgagctgcaagaaggagatacgattacgtgctttatttccacagatcagtcagaatttacgctgccaaaagaccctgaaacgccgcttatcatggtcggaccgggaacaggcgtcgcgccgtttagaggctttgtgcaggcgcgcaaacagctaaaagaacaaggacagtcacttggagaagcacatttatacttcggctgccgttcacctcatgaagactatctgtatcaagaagagcttgaaaacgcccaaagcgaaggcatcattacgcttcataccgctttttctcgcatgccaaatcagccgaaaacatacgttcagcacgtaatggaacaagacggcaagaaattgattgaacttcttgatcaaggagcgcacttctatatttgcggagacggaagccaaatggcacctgccgttgaagcaacgcttatgaaaagctatgctgacgttcaccaagtgagtgaagcagacgctcgcttatggctgcagcagctagaagaaaaaggccgatacgcaaaagacgtgtgggctggg

SEQ ID NO: 602 - protein, 1049 aa, synthetic construct
  REGION 1..1049: note = Variant of cytochrome P450
MTIKEMPQPKTFGELKNLPLLNTDKPVQALMRIADELGEIFKFEAPGSVTRFLSSQRLIKEACDESRFDKNLSQGLKFARDFLGDGLFTSWTHEPNWKKAHNILGPSFSQLAMKRYHAMMVDIAVQLVQKWERLNADEHIEVSEDMTRLTLDTIGLCGFNYRFNSFYRDQPHPFIVSVERALDEVMNKLQRANPDDPAYDENKRQCQEDIKVMNDYVDKIIADRKARGEQSHDLLTQMLNGKDPETGEPLDDGNIRYQIITFLIAGHETTSGLLSFALYFLVKNPHVLQKVAEEAARVLVDPVPSYKQVKQLKYVGMVLNEALRLWPTAPAFSLYAKEDTVLGGEYPLTKGDEVMVLIPQLHRDKTIWGDDVEEFRPERFENPSAIPQHAFKPFGNGQRACIGQQFALHEATLVLGMMLKHFDFEDHTNYELVIKEKLTLKPEGFVVKAKSKGIPLGGIPSPSTEQSAKKVRKKAENAHNTPLLVLYGSNAGTAEGTARDLADIAMSKGFAPQVATLDSHAGNLPREGAVLIVTASYNGHPPDNAKQFVDWLDQASADEVKGVRYSVFGCGDKNWAATYQKVPAFIDETLAAKGAENIADRGEADASDDFEGTYEEWSDHMWSDVAAYFNLDIENSEDNKSTLSLQFVDSAADMPLAKMHGAFSTNVVASKELQQPGSARSTRHLEIELPKEASYQEGDHLGVIPRNYEGIVNRVTARFGLSASQQIRLEAEEEKLAHLPLAKTVSVEELLQYVELQDPVTRTQLRAMAAKTVCPPHKVELEALLEKQAYKEQVLAKRLTMLELLEKYPACEMKFSEFIALLPSIRPRYYSISSSPRVDEKQASITVSVVSGPAWSGYGEYKGIASNYLAELQEGDTITCFISTDQSEFTLPKDPETPLIMVGPGTGVAPFRGFVQARKQLKEQGQSLGEAHLYFGCRSPHEDYLYQEELENAQSEGIITLHTAFSRMPNQPKTYVQHVMEQDGKKLIELLDQGAHFYICGDGSQMAPAVEATLMKSYADVHQVSEADARLWLQQLEEKGRYAKDVWAG

SEQ ID NO: 603 - DNA, 3147 bp, synthetic construct
  misc_feature 1..3147: note = Variant of cytochrome P450
  source 1..3147: mol_type = other DNA
atgacaattaaggaaatgcctcagcctaagacgtttggagaacttaaaaatttaccgttattaaacacagataaaccggttcaagctttgatgcgtattgcggatgaattaggagaaatctttaaattcgaggcgcctggtagcgtaacgcgctttttatcaagtcagcgtctaattaaagaagcatgcgatgaatcacgctttgataaaaacttaagtcaaggccttaaatttgcacgtgattttcttggagacgggttatttacaagctggacgcatgaaccgaattggaaaaaagcgcataatatcttaggcccaagctttagtcagcgtgcaatgaaacgttatcatgcgatgatggtcgatatcgccgtgcagcttgttcaaaagtgggagcgtctaaatgcagatgagcatattgaagtatcggaagacatgacacgtttaacgctggatacaattggtctttgcggcttcaactatcgctttaacagcttttaccgagatcagcctcatccatttattgtgagtgttgagcgtgcactggatgaagtaatgaacaagctgcagcgagcaaatccagacgacccagcttatgatgaaaacaagcgccagtgtcaagaagatatcaaggtgatgaacgactatgtcgataaaattattgcagatcgcaaagcaaggggtgaacaaagccatgatttattaacgcagatgctaaacggaaaagatccagaaacgggtgagccgcttgatgacgggaacattcgttatcaaattattacattcttaattgcgggacacgaaacaacaagtggtcttttatcatttgcgctgtatttcttagtgaaaaatccacatgtattacaaaaagtagcagaagaagcagcacgagttctagtagatcctgttccaagctacaaacaagtcaaacagcttaaatatgtcggcatggtcttaaacgaagcgctgcgcttatggccaactgctcctgcgttttccctatatgcaaaagaagatacggtgcttggaggagaatatcctttaaccaaaggcgacgaagtaatggttctgattcctcagcttcaccgtgataaaacaatttggggagacgatgtggaggagttccgtccagagcgttttgaaaatccaagtgcgattccgcagcatgcgtttaaaccgtttggaaacggtcagcgtgcgtgtatcggtcagcagttcgctcttcatgaagcaacgctggtacttggtatgatgctaaaacactttgactttgaagatcatacaaactacgagctcgttattaaagaaaagttaacgttaaaacctgaaggctttgtggtaaaagcaaaatcgaaaggcattccgcttggcggtattccttcacctagcactgaacagtctgctaaaaaagtacgcaaaaaggcagaaaacgctcataatacgccgctgcttgtgctatacggttcaaatgcgggaacagctgaaggaacggcgcgtgatttagcagatattgcaatgagcaaaggatttgcaccgcaggtcgcaacgcttgattcacacgccggaaatcttccgcgcgaaggagctgtattaattgtaacggcgtcttataacggtcatccgcctgataacgcaaaggtttttgtcgactggttagaccaagcgtctgctgatgaagtaaaaggcgttcgctactccgtatttggatgcggcgataaaaactgggctgcgacgtatcaaaaagtgcctgcttttatcgatgaaacgcttgccgctaaaggggcagaaaacatcgctgaccgcggtgaagcagatgcaagcgacgactttgaaggcacatatgaagaatggagtgatcatatgtggagtgacgtagcagcctactttaacctcgacattgaaaacagtgaagataataaatctactctttcacttcaatttgtcgacagcgccgcggatatgccgcttgcgaaaatgcacggtgcgttttcaacgaacgtcgtagcaagcaaagaacttcaacagccaggcagtgcacgaagcacgcgacatcttgaaattgaacttccaaaagaagcttcttatcaagaaggagatcatttaggtgttattcctcgcaactatgaaggaatagtaaaccgtgtaacagcaaggttcggcctaagcgcatcacagcaaatccgtctggaagcagaagaagaaaaattagctcatttgccactcgctaaaacagtatccgtagaagagcttctgcaatacgtggagcttcaagatcctgttacgcgcacgcagcttcgcgcaatggctgctaaaacggtctgcccgccgcataaagtagagcttgaagccttgcttgaaaagcaagcctacaaagaacaagtgctggcaaaacgtttaacaatgcttgaactgcttgaaaaatacccggcgtgtgaaatgaaattcagcgaatttatcgcccttctgccaagcatacgcccgcgctattactcgatttcttcatcacctcgtgtcgatgaaaaacaagcaagcatcacggtcagcgttgtctcaggaccggcgtggagcggatatggagaatataaaggaattgcgtcgaactatcttgccgagctgcaagaaggagatacgattacgtgctttatttccacagatcagtcagaatttacgctgccaaaagaccctgaaacgccgcttatcatggtcggaccgggaacaggcgtcgcgccgtttagaggctttgtgcaggcgcgcaaacagctaaaagaacaaggacagtcacttggagaagcacatttatacttcggctgccgttcacctcatgaagactatctgtatcaagaagagcttgaaaacgcccaaagcgaaggcatcattacgcttcataccgctttttctcgcatgccaaatcagccgaaaacatacgttcagcacgtaatggaacaagacggcaagaaattgattgaacttcttgatcaaggagcgcacttctatatttgcggagacggaagccaaatggcacctgccgttgaagcaacgcttatgaaaagctatgctgacgttcaccaagtgagtgaagcagacgctcgcttatggctgcagcagctagaagaaaaaggccgatacgcaaaagacgtgtgggctggg

SEQ ID NO: 604 - protein, 1049 aa, synthetic construct
  REGION 1..1049: note = Variant of cytochrome P450
MTIKEMPQPKTFGELKNLPLLNTDKPVQALMRIADELGEIFKFEAPGSVTRFLSSQRLIKEACDESRFDKNLSQGLKFARDFLGDGLFTSWTHEPNWKKAHNILGPSFSQRAMKRYHAMMVDIAVQLVQKWERLNADEHIEVSEDMTRLTLDTIGLCGFNYRFNSFYRDQPHPFIVSVERALDEVMNKLQRANPDDPAYDENKRQCQEDIKVMNDYVDKIIADRKARGEQSHDLLTQMLNGKDPETGEPLDDGNIRYQIITFLIAGHETTSGLLSFALYFLVKNPHVLQKVAEEAARVLVDPVPSYKQVKQLKYVGMVLNEALRLWPTAPAFSLYAKEDTVLGGEYPLTKGDEVMVLIPQLHRDKTIWGDDVEEFRPERFENPSAIPQHAFKPFGNGQRACIGQQFALHEATLVLGMMLKHFDFEDHTNYELVIKEKLTLKPEGFVVKAKSKGIPLGGIPSPSTEQSAKKVRKKAENAHNTPLLVLYGSNAGTAEGTARDLADIAMSKGFAPQVATLDSHAGNLPREGAVLIVTASYNGHPPDNAKVFVDWLDQASADEVKGVRYSVFGCGDKNWAATYQKVPAFIDETLAAKGAENIADRGEADASDDFEGTYEEWSDHMWSDVAAYFNLDIENSEDNKSTLSLQFVDSAADMPLAKMHGAFSTNVVASKELQQPGSARSTRHLEIELPKEASYQEGDHLGVIPRNYEGIVNRVTARFGLSASQQIRLEAEEEKLAHLPLAKTVSVEELLQYVELQDPVTRTQLRAMAAKTVCPPHKVELEALLEKQAYKEQVLAKRLTMLELLEKYPACEMKFSEFIALLPSIRPRYYSISSSPRVDEKQASITVSVVSGPAWSGYGEYKGIASNYLAELQEGDTITCFISTDQSEFTLPKDPETPLIMVGPGTGVAPFRGFVQARKQLKEQGQSLGEAHLYFGCRSPHEDYLYQEELENAQSEGIITLHTAFSRMPNQPKTYVQHVMEQDGKKLIELLDQGAHFYICGDGSQMAPAVEATLMKSYADVHQVSEADARLWLQQLEEKGRYAKDVWAG

SEQ ID NO: 605 - DNA, 3147 bp, synthetic construct
  misc_feature 1..3147: note = Variant of cytochrome P450
  source 1..3147: mol_type = other DNA
atgacaattaaggaaatgcctcagcctaagacgtttggagaacttaaaaatttaccgttattaaacacagataaaccggttcaagctttgatgcgtattgcggatgaattaggagaaatctttaaattcgaggcgcctggtagcgtaacgcgctttttatcaagtcagcgtctaattaaagaagcatgcgatgaatcacgctttgataaaaacttaagtcaaggccttaaatttgcacgtgattttcttggagacgggttatttacaagctggacgcatgaaccgaattggaaaaaagcgcataatatcttaggcccaagctttagtcagcgtgcaatgaaacgttatcatgcgatgatggtcgatatcgccgtgcagcttgttcaaaagtgggagcgtctaaatgcagatgagcatattgaagtatcggaagacatgacacgtttaacgctggatacaattggtctttgcggcttcaactatcgctttaacagcttttaccgagatcagcctcatccatttattgtgagtgttgagcgtgcactggatgaagtaatgaacaagctgcagcgagcaaatccagacgacccagcttatgatgaaaacaagcgccagtgtcaagaagatatcaaggtgatgaacgactatgtcgataaaattattgcagatcgcaaagcaaggggtgaacaaagccatgatttattaacgcagatgctaaacggaaaagatccaggtacgggtgagccgcttgatgacgggaacattcgttatcaaattattacattcttaattgcgggacacgaaacaacaagtggtcttttatcatttgcgctgtatttcttagtgaaaaatccacatgtattacaaaaagtagcagaagaagcagcacgagttctagtagatcctgttccaagctacaaacaagtcaaacagcttaaatatgtcggcatggtcttaaacgaagcgctgcgcttatggccaactgctcctgcgttttccctatatgcaaaagaagatacggtgcttggaggagaatatcctttaaccaaaggcgacgaagtaatggttctgattcctcagcttcaccgtgataaaacaatttggggagacgatgtggaggagttccgtccagagcgttttgaaaatccaagtgcgattccgcagcatgcgtttaaaccgtttggaaacggtcagcgtgcgtgtatcggtcagcagttcgctcttcatgaagcaacgctggtacttggtatgatgctaaaacactttgactttgaagatcatacaaactacgagctcgttattaaagaaaagttaacgttaaaacctgaaggctttgtggtaaaagcaaaatcgaaaggcattccgcttggcggtattccttcacctagcactgaacagtctgctaaaaaagtacgcaaaaaggcagaaaacgctcataatacgccgctgcttgtgctatacggttcaaatgcgggaacagctgaaggaacggcgcgtgatttagcagatattgcaatgagcaaaggatttgcaccgcaggtcgcaacgcttgattcacacgccggaaatcttccgcgcgaaggagctgtattaattgtaacggcgtcttataacggtcatccgcctgataacgcaaagcaatttgtcgactggttagaccaagcgtctgctgatgaagtaaaaggcgttcgctactccgtatttggatgcggcgataaaaactgggctgcgacgtatcaaaaagtgcctgcttttatcgatgaaacgcttgccgctaaaggggcagaaaacatcgctgaccgcggtgaagcagatgcaagcgacgactttgaaggcacatatgaagaatggagtgatcatatgtggagtgacgtagcagcctactttaacctcgacattgaaaacagtgaagataataaatctactctttcacttcaatttgtcgacagcgccgcggatatgccgcttgcgaaaatgcacggtgcgttttcaacgaacgtcgtagcaagcaaagaacttcaacagccaggcagtgcacgaagcacgcgacatcttgaaattgaacttccaaaagaagcttcttatcaagaaggagatcatttaggtgttattcctcgcaactatgaaggaatagtaaaccgtgtaacagcaaggttcggcctaagcgcatcacagcaaatccgtctggaagcagaagaagaaaaattagctcatttgccactcgctaaaacagtatccgtagaagagcttctgcaatacgtggagcttcaagatcctgttacgcgcacgcagcttcgcgcaatggctgctaaaacggtctgcccgccgcataaagtagagcttgaagccttgcttgaaaagcaagcctacaaagaacaagtgctggcaaaacgtttaacaatgcttgaactgcttgaaaaatacccggcgtgtgaaatgaaattcagcgaatttatcgcccttctgccaagcatacgcccgcgctattactcgatttcttcatcacctcgtgtcgatgaaaaacaagcaagcatcacggtcagcgttgtctcaggaccggcgtggagcggatatggagaatataaaggaattgcgtcgaactatcttgccgagctgcaagaaggagatacgattacgtgctttatttccacagatcagtcagaatttacgctgccaaaagaccctgaaacgccgcttatcatggtcggaccgggaacaggcgtcgcgccgtttagaggctttgtgcaggcgcgcaaacagctaaaagaacaaggacagtcacttggagaagcacatttatacttcggctgccgttcacctcatgaagactatctgtatcaagaagagcttgaaaacgcccaaagcgaaggcatcattacgcttcataccgctttttctcgcatgccaaatcagccgaaaacatacgttcagcacgtaatggaacaagacggcaagaaattgattgaacttcttgatcaaggagcgcacttctatatttgcggagacggaagccaaatggcacctgccgttgaagcaacgcttatgaaaagctatgctgacgttcaccaagtgagtgaagcagacgctcgcttatggctgcagcagctagaagaaaaaggccgatacgcaaaagacgtgtgggctggg

SEQ ID NO: 606 - protein, 1049 aa, synthetic construct
  REGION 1..1049: note = Variant of cytochrome P450
MTIKEMPQPKTFGELKNLPLLNTDKPVQALMRIADELGEIFKFEAPGSVTRFLSSQRLIKEACDESRFDKNLSQGLKFARDFLGDGLFTSWTHEPNWKKAHNILGPSFSQRAMKRYHAMMVDIAVQLVQKWERLNADEHIEVSEDMTRLTLDTIGLCGFNYRFNSFYRDQPHPFIVSVERALDEVMNKLQRANPDDPAYDENKRQCQEDIKVMNDYVDKIIADRKARGEQSHDLLTQMLNGKDPGTGEPLDDGNIRYQIITFLIAGHETTSGLLSFALYFLVKNPHVLQKVAEEAARVLVDPVPSYKQVKQLKYVGMVLNEALRLWPTAPAFSLYAKEDTVLGGEYPLTKGDEVMVLIPQLHRDKTIWGDDVEEFRPERFENPSAIPQHAFKPFGNGQRACIGQQFALHEATLVLGMMLKHFDFEDHTNYELVIKEKLTLKPEGFVVKAKSKGIPLGGIPSPSTEQSAKKVRKKAENAHNTPLLVLYGSNAGTAEGTARDLADIAMSKGFAPQVATLDSHAGNLPREGAVLIVTASYNGHPPDNAKQFVDWLDQASADEVKGVRYSVFGCGDKNWAATYQKVPAFIDETLAAKGAENIADRGEADASDDFEGTYEEWSDHMWSDVAAYFNLDIENSEDNKSTLSLQFVDSAADMPLAKMHGAFSTNVVASKELQQPGSARSTRHLEIELPKEASYQEGDHLGVIPRNYEGIVNRVTARFGLSASQQIRLEAEEEKLAHLPLAKTVSVEELLQYVELQDPVTRTQLRAMAAKTVCPPHKVELEALLEKQAYKEQVLAKRLTMLELLEKYPACEMKFSEFIALLPSIRPRYYSISSSPRVDEKQASITVSVVSGPAWSGYGEYKGIASNYLAELQEGDTITCFISTDQSEFTLPKDPETPLIMVGPGTGVAPFRGFVQARKQLKEQGQSLGEAHLYFGCRSPHEDYLYQEELENAQSEGIITLHTAFSRMPNQPKTYVQHVMEQDGKKLIELLDQGAHFYICGDGSQMAPAVEATLMKSYADVHQVSEADARLWLQQLEEKGRYAKDVWAG

SEQ ID NO: 607 - DNA, 3147 bp, synthetic construct
  misc_feature 1..3147: note = Variant of cytochrome P450
  source 1..3147: mol_type = other DNA
atgacaattaaggaaatgcctcagcctaagacgtttggagaacttaaaaatttaccgttattaaacacagataaaccggttcaagctttgatgcgtattgcggatgaattaggagaaatctttaaattcgaggcgcctggtagcgtaacgcgctttttatcaagtcagcgtctaattaaagaagcatgcgatgaatcacgctttgataaaaacttaagtcaaggccttaaatttgcacgtgattttcttggagacgggttatttacaagctggacgcatgaaccgaattggaaaaaagcgcataatatcttaggcccaagctttagtcagcgtgcaatggtgcgttatcatgcgatgatggtcgatatcgccgtgcagcttgttcaaaagtgggagcgtctaaatgcagatgagcatattgaagtatcggaagacatgacacgtttaacgctggatacaattggtctttgcggcttcaactatcgctttaacagcttttaccgagatcagcctcatccatttattgtgagtgttgagcgtgcactggatgaagtaatgaacaagctgcagcgagcaaatccagacgacccagcttatgatgaaaacaagcgccagtgtcaagaagatatcaaggtgatgaacgactatgtcgataaaattattgcagatcgcaaagcaaggggtgaacaaagccatgatttattaacgcagatgctaaacggaaaagatccagaaacgggtgagccgcttgatgacgggaacattcgttatcaaattattacattcttaattgcgggacacgaaacaacaagtggtcttttatcatttgcgctgtatttcttagtgaaaaatccacatgtattacaaaaagtagcagaagaagcagcacgagttctagtagatcctgttccaagctacaaacaagtcaaacagcttaaatatgtcggcatggtcttaaacgaagcgctgcgcttatggccaactgctcctgcgttttccctatatgcaaaagaagatacggtgcttggaggagaatatcctttaaccaaaggcgacgaagtaatggttctgattcctcagcttcaccgtgataaaacaatttggggagacgatgtggaggagttccgtccagagcgttttgaaaatccaagtgcgattccgcagcatgcgtttaaaccgtttggaaacggtcagcgtgcgtgtatcggtcagcagttcgctcttcatgaagcaacgctggtacttggtatgatgctaaaacactttgactttgaagatcatacaaactacgagctcgttattaaagaaaagttaacgttaaaacctgaaggctttgtggtaaaagcaaaatcgaaaggcattccgcttggcggtattccttcacctagcactgaacagtctgctaaaaaagtacgcaaaaaggcagaaaacgctcataatacgccgctgcttgtgctatacggttcaaatgcgggaacagctgaaggaacggcgcgtgatttagcagatattgcaatgagcaaaggatttgcaccgcaggtcgcaacgcttgattcacacgccggaaatcttccgcgcgaaggagctgtattaattgtaacggcgtcttataacggtcatccgcctgataacgcaaagcaatttgtcgactggttagaccaagcgtctgctgatgaagtaaaaggcgttcgctactccgtatttggatgcggcgataaaaactgggctgcgacgtatcaaaaagtgcctgcttttatcgatgaaacgcttgccgctaaaggggcagaaaacatcgctgaccgcggtgaagcagatgcaagcgacgactttgaaggcacatatgaagaatggagtgatcatatgtggagtgacgtagcagcctactttaacctcgacattgaaaacagtgaagataataaatctactctttcacttcaatttgtcgacagcgccgcggatatgccgcttgcgaaaatgcacggtgcgttttcaacgaacgtcgtagcaagcaaagaacttcaacagccaggcagtgcacgaagcacgcgacatcttgaaattgaacttccaaaagaagcttcttatcaagaaggagatcatttaggtgttattcctcgcaactatgaaggaatagtaaaccgtgtaacagcaaggttcggcctaagcgcatcacagcaaatccgtctggaagcagaagaagaaaaattagctcatttgccactcgctaaaacagtatccgtagaagagcttctgcaatacgtggagcttcaagatcctgttacgcgcacgcagcttcgcgcaatggctgctaaaacggtctgcccgccgcataaagtagagcttgaagccttgcttgaaaagcaagcctacaaagaacaagtgctggcaaaacgtttaacaatgcttgaactgcttgaaaaatacccggcgtgtgaaatgaaattcagcgaatttatcgcccttctgccaagcatacgcccgcgctattactcgatttcttcatcacctcgtgtcgatgaaaaacaagcaagcatcacggtcagcgttgtctcaggaccggcgtggagcggatatggagaatataaaggaattgcgtcgaactatcttgccgagctgcaagaaggagatacgattacgtgctttatttccacagatcagtcagaatttacgctgccaaaagaccctgaaacgccgcttatcatggtcggaccgggaacaggcgtcgcgccgtttagaggctttgtgcaggcgcgcaaacagctaaaagaacaaggacagtcacttggagaagcacatttatacttcggctgccgttcacctcatgaagactatctgtatcaagaagagcttgaaaacgcccaaagcgaaggcatcattacgcttcataccgctttttctcgcatgccaaatcagccgaaaacatacgttcagcacgtaatggaacaagacggcaagaaattgattgaacttcttgatcaaggagcgcacttctatatttgcggagacggaagccaaatggcacctgccgttgaagcaacgcttatgaaaagctatgctgacgttcaccaagtgagtgaagcagacgctcgcttatggctgcagcagctagaagaaaaaggccgatacgcaaaagacgtgtgggctggg

SEQ ID NO: 608 - protein, 1049 aa, synthetic construct
  REGION 1..1049: note = Variant of cytochrome P450
MTIKEMPQPKTFGELKNLPLLNTDKPVQALMRIADELGEIFKFEAPGSVTRFLSSQRLIKEACDESRFDKNLSQGLKFARDFLGDGLFTSWTHEPNWKKAHNILGPSFSQRAMVRYHAMMVDIAVQLVQKWERLNADEHIEVSEDMTRLTLDTIGLCGFNYRFNSFYRDQPHPFIVSVERALDEVMNKLQRANPDDPAYDENKRQCQEDIKVMNDYVDKIIADRKARGEQSHDLLTQMLNGKDPETGEPLDDGNIRYQIITFLIAGHETTSGLLSFALYFLVKNPHVLQKVAEEAARVLVDPVPSYKQVKQLKYVGMVLNEALRLWPTAPAFSLYAKEDTVLGGEYPLTKGDEVMVLIPQLHRDKTIWGDDVEEFRPERFENPSAIPQHAFKPFGNGQRACIGQQFALHEATLVLGMMLKHFDFEDHTNYELVIKEKLTLKPEGFVVKAKSKGIPLGGIPSPSTEQSAKKVRKKAENAHNTPLLVLYGSNAGTAEGTARDLADIAMSKGFAPQVATLDSHAGNLPREGAVLIVTASYNGHPPDNAKQFVDWLDQASADEVKGVRYSVFGCGDKNWAATYQKVPAFIDETLAAKGAENIADRGEADASDDFEGTYEEWSDHMWSDVAAYFNLDIENSEDNKSTLSLQFVDSAADMPLAKMHGAFSTNVVASKELQQPGSARSTRHLEIELPKEASYQEGDHLGVIPRNYEGIVNRVTARFGLSASQQIRLEAEEEKLAHLPLAKTVSVEELLQYVELQDPVTRTQLRAMAAKTVCPPHKVELEALLEKQAYKEQVLAKRLTMLELLEKYPACEMKFSEFIALLPSIRPRYYSISSSPRVDEKQASITVSVVSGPAWSGYGEYKGIASNYLAELQEGDTITCFISTDQSEFTLPKDPETPLIMVGPGTGVAPFRGFVQARKQLKEQGQSLGEAHLYFGCRSPHEDYLYQEELENAQSEGIITLHTAFSRMPNQPKTYVQHVMEQDGKKLIELLDQGAHFYICGDGSQMAPAVEATLMKSYADVHQVSEADARLWLQQLEEKGRYAKDVWAG

SEQ ID NO: 609 - DNA, 3147 bp, synthetic construct
  misc_feature 1..3147: note = Variant of cytochrome P450
  source 1..3147: mol_type = other DNA
atgacaattaaggaaatgcctcagcctaagacgtttggagaacttaaaaatttaccgttattaaacacagataaaccggttcaagctttgatgcgtattgcggatgaattaggagaaatctttaaattcgaggcgcctggtagcgtaacgcgctttttatcaagtcagcgtctaattaaagaagcatgcgatgaatcacgctttgataaaaacttaagtcaaggccttaaatttgcacgtgattttcttggagacgggttatttacaagctggacgcatgaaccgaattggaaaaaagcgcataatatcttaggcccaagctttagtcagcgtgcaatggggcgttatcatgcgatgatggtcgatatcgccgtgcagcttgttcaaaagtgggagcgtctaaatgcagatgagcatattgaagtatcggaagacatgacacgtttaacgctggatacaattggtctttgcggcttcaactatcgctttaacagcttttaccgagatcagcctcatccatttattgtgagtgttgagcgtgcactggatgaagtaatgaacaagctgcagcgagcaaatccagacgacccagcttatgatgaaaacaagcgccagtgtcaagaagatatcaaggtgatgaacgactatgtcgataaaattattgcagatcgcaaagcaaggggtgaacaaagccatgatttattaacgcagatgctaaacggaaaagatccagaaacgggtgagccgcttgatgacgggaacattcgttatcaaattattacattcttaattgcgggacacgaaacaacaagtggtcttttatcatttgcgctgtatttcttagtgaaaaatccacatgtattacaaaaagtagcagaagaagcagcacgagttctagtagatcctgttccaagctacaaacaagtcaaacagcttaaatatgtcggcatggtcttaaacgaagcgctgcgcttatggccaactgctcctgcgttttccctatatgcaaaagaagatacggtgcttggaggagaatatcctttaaccaaaggcgacgaagtaatggttctgattcctcagcttcaccgtgataaaacaatttggggagacgatgtggaggagttccgtccagagcgttttgaaaatccaagtgcgattccgcagcatgcgtttaaaccgtttggaaacggtcagcgtgcgtgtatcggtcagcagttcgctcttcatgaagcaacgctggtacttggtatgatgctaaaacactttgactttgaagatcatacaaactacgagctcgttattaaagaaaagttaacgttaaaacctgaaggctttgtggtaaaagcaaaatcgaaaggcattccgcttggcggtattccttcacctagcactgaacagtctgctaaaaaagtacgcaaaaaggcagaaaacgctcataatacgccgctgcttgtgctatacggttcaaatgcgggaacagctgaaggaacggcgcgtgatttagcagatattgcaatgagcaaaggatttgcaccgcaggtcgcaacgcttgattcacacgccggaaatcttccgcgcgaaggagctgtattaattgtaacggcgtcttataacggtcatccgcctgataacgcaaagcaatttgtcgactggttagaccaagcgtctgctgatgaagtaaaaggcgttcgctactccgtatttggatgcggcgataaaaactgggctgcgacgtatcaaaaagtgcctgcttttatcgatgaaacgcttgccgctaaaggggcagaaaacatcgctgaccgcggtgaagcagatgcaagcgacgactttgaaggcacatatgaagaatggagtgatcatatgtggagtgacgtagcagcctactttaacctcgacattgaaaacagtgaagataataaatctactctttcacttcaatttgtcgacagcgccgcggatatgccgcttgcgaaaatgcacggtgcgttttcaacgaacgtcgtagcaagcaaagaacttcaacagccaggcagtgcacgaagcacgcgacatcttgaaattgaacttccaaaagaagcttcttatcaagaaggagatcatttaggtgttattcctcgcaactatgaaggaatagtaaaccgtgtaacagcaaggttcggcctaagcgcatcacagcaaatccgtctggaagcagaagaagaaaaattagctcatttgccactcgctaaaacagtatccgtagaagagcttctgcaatacgtggagcttcaagatcctgttacgcgcacgcagcttcgcgcaatggctgctaaaacggtctgcccgccgcataaagtagagcttgaagccttgcttgaaaagcaagcctacaaagaacaagtgctggcaaaacgtttaacaatgcttgaactgcttgaaaaatacccggcgtgtgaaatgaaattcagcgaatttatcgcccttctgccaagcatacgcccgcgctattactcgatttcttcatcacctcgtgtcgatgaaaaacaagcaagcatcacggtcagcgttgtctcaggaccggcgtggagcggatatggagaatataaaggaattgcgtcgaactatcttgccgagctgcaagaaggagatacgattacgtgctttatttccacagatcagtcagaatttacgctgccaaaagaccctgaaacgccgcttatcatggtcggaccgggaacaggcgtcgcgccgtttagaggctttgtgcaggcgcgcaaacagctaaaagaacaaggacagtcacttggagaagcacatttatacttcggctgccgttcacctcatgaagactatctgtatcaagaagagcttgaaaacgcccaaagcgaaggcatcattacgcttcataccgctttttctcgcatgccaaatcagccgaaaacatacgttcagcacgtaatggaacaagacggcaagaaattgattgaacttcttgatcaaggagcgcacttctatatttgcggagacggaagccaaatggcacctgccgttgaagcaacgcttatgaaaagctatgctgacgttcaccaagtgagtgaagcagacgctcgcttatggctgcagcagctagaagaaaaaggccgatacgcaaaagacgtgtgggctggg

SEQ ID NO: 610 - protein, 1049 aa, synthetic construct
  REGION 1..1049: note = Variant of cytochrome P450
MTIKEMPQPKTFGELKNLPLLNTDKPVQALMRIADELGEIFKFEAPGSVTRFLSSQRLIKEACDESRFDKNLSQGLKFARDFLGDGLFTSWTHEPNWKKAHNILGPSFSQRAMGRYHAMMVDIAVQLVQKWERLNADEHIEVSEDMTRLTLDTIGLCGFNYRFNSFYRDQPHPFIVSVERALDEVMNKLQRANPDDPAYDENKRQCQEDIKVMNDYVDKIIADRKARGEQSHDLLTQMLNGKDPETGEPLDDGNIRYQIITFLIAGHETTSGLLSFALYFLVKNPHVLQKVAEEAARVLVDPVPSYKQVKQLKYVGMVLNEALRLWPTAPAFSLYAKEDTVLGGEYPLTKGDEVMVLIPQLHRDKTIWGDDVEEFRPERFENPSAIPQHAFKPFGNGQRACIGQQFALHEATLVLGMMLKHFDFEDHTNYELVIKEKLTLKPEGFVVKAKSKGIPLGGIPSPSTEQSAKKVRKKAENAHNTPLLVLYGSNAGTAEGTARDLADIAMSKGFAPQVATLDSHAGNLPREGAVLIVTASYNGHPPDNAKQFVDWLDQASADEVKGVRYSVFGCGDKNWAATYQKVPAFIDETLAAKGAENIADRGEADASDDFEGTYEEWSDHMWSDVAAYFNLDIENSEDNKSTLSLQFVDSAADMPLAKMHGAFSTNVVASKELQQPGSARSTRHLEIELPKEASYQEGDHLGVIPRNYEGIVNRVTARFGLSASQQIRLEAEEEKLAHLPLAKTVSVEELLQYVELQDPVTRTQLRAMAAKTVCPPHKVELEALLEKQAYKEQVLAKRLTMLELLEKYPACEMKFSEFIALLPSIRPRYYSISSSPRVDEKQASITVSVVSGPAWSGYGEYKGIASNYLAELQEGDTITCFISTDQSEFTLPKDPETPLIMVGPGTGVAPFRGFVQARKQLKEQGQSLGEAHLYFGCRSPHEDYLYQEELENAQSEGIITLHTAFSRMPNQPKTYVQHVMEQDGKKLIELLDQGAHFYICGDGSQMAPAVEATLMKSYADVHQVSEADARLWLQQLEEKGRYAKDVWAG

SEQ ID NO: 611 - DNA, 3147 bp, synthetic construct
  misc_feature 1..3147: note = Variant of cytochrome P450
  source 1..3147: mol_type = other DNA
atgacaattaaggaaatgcctcagcctaagacgtttggagaacttaaaaatttaccgttattaaacacagataaaccggttcaagctttgatgcgtattgcggatgaattaggagaaatctttaaattcgaggcgcctggtagcgtaacgcgctttttatcaagtcagcgtctaattaaagaagcatgcgatgaatcacgctttgataaaaacttaagtcaaggccttaaatttgcacgtgattttcttggagacgggttatttacaagctggacgcatgaaccgaattggaaaaaagcgcataatatcttaggcccaagctttagtcagcgtgcaatgaaacgttatcatgcgatgatggtcgatatcgcctggcagcttgttcaaaagtgggagcgtctaaatgcagatgagcatattgaagtatcggaagacatgacacgtttaacgctggatacaattggtctttgcggcttcaactatcgctttaacagcttttaccgagatcagcctcatccatttattgtgagtgttgagcgtgcactggatgaagtaatgaacaagctgcagcgagcaaatccagacgacccagcttatgatgaaaacaagcgccagtgtcaagaagatatcaaggtgatgaacgactatgtcgataaaattattgcagatcgcaaagcaaggggtgaacaaagccatgatttattaacgcagatgctaaacggaaaagatccagaaacgggtgagccgcttgatgacgggaacattcgttatcaaattattacattcttaattgcgggacacgaaacaacaagtggtcttttatcatttgcgctgtatttcttagtgaaaaatccacatgtattacaaaaagtagcagaagaagcagcacgagttctagtagatcctgttccaagctacaaacaagtcaaacagcttaaatatgtcggcatggtcttaaacgaagcgctgcgcttatggccaactgctcctgcgttttccctatatgcaaaagaagatacggtgcttggaggagaatatcctttaaccaaaggcgacgaagtaatggttctgattcctcagcttcaccgtgataaaacaatttggggagacgatgtggaggagttccgtccagagcgttttgaaaatccaagtgcgattccgcagcatgcgtttaaaccgtttggaaacggtcagcgtgcgtgtatcggtcagcagttcgctcttcatgaagcaacgctggtacttggtatgatgctaaaacactttgactttgaagatcatacaaactacgagctcgttattaaagaaaagttaacgttaaaacctgaaggctttgtggtaaaagcaaaatcgaaaggcattccgcttggcggtattccttcacctagcactgaacagtctgctaaaaaagtacgcaaaaaggcagaaaacgctcataatacgccgctgcttgtgctatacggttcaaatgcgggaacagctgaaggaacggcgcgtgatttagcagatattgcaatgagcaaaggatttgcaccgcaggtcgcaacgcttgattcacacgccggaaatcttccgcgcgaaggagctgtattaattgtaacggcgtcttataacggtcatccgcctgataacgcaaagcaatttgtcgactggttagaccaagcgtctgctgatgaagtaaaaggcgttcgctactccgtatttggatgcggcgataaaaactgggctgcgacgtatcaaaaagtgcctgcttttatcgatgaaacgcttgccgctaaaggggcagaaaacatcgctgaccgcggtgaagcagatgcaagcgacgactttgaaggcacatatgaagaatggagtgatcatatgtggagtgacgtagcagcctactttaacctcgacattgaaaacagtgaagataataaatctactctttcacttcaatttgtcgacagcgccgcggatatgccgcttgcgaaaatgcacggtgcgttttcaacgaacgtcgtagcaagcaaagaacttcaacagccaggcagtgcacgaagcacgcgacatcttgaaattgaacttccaaaagaagcttcttatcaagaaggagatcatttaggtgttattcctcgcaactatgaaggaatagtaaaccgtgtaacagcaaggttcggcctaagcgcatcacagcaaatccgtctggaagcagaagaagaaaaattagctcatttgccactcgctaaaacagtatccgtagaagagcttctgcaatacgtggagcttcaagatcctgttacgcgcacgcagcttcgcgcaatggctgctaaaacggtctgcccgccgcataaagtagagcttgaagccttgcttgaaaagcaagcctacaaagaacaagtgctggcaaaacgtttaacaatgcttgaactgcttgaaaaatacccggcgtgtgaaatgaaattcagcgaatttatcgcccttctgccaagcatacgcccgcgctattactcgatttcttcatcacctcgtgtcgatgaaaaacaagcaagcatcacggtcagcgttgtctcaggaccggcgtggagcggatatggagaatataaaggaattgcgtcgaactatcttgccgagctgcaagaaggagatacgattacgtgctttatttccacagatcagtcagaatttacgctgccaaaagaccctgaaacgccgcttatcatggtcggaccgggaacaggcgtcgcgccgtttagaggctttgtgcaggcgcgcaaacagctaaaagaacaaggacagtcacttggagaagcacatttatacttcggctgccgttcacctcatgaagactatctgtatcaagaagagcttgaaaacgcccaaagcgaaggcatcattacgcttcataccgctttttctcgcatgccaaatcagccgaaaacatacgttcagcacgtaatggaacaagacggcaagaaattgattgaacttcttgatcaaggagcgcacttctatatttgcggagacggaagccaaatggcacctgccgttgaagcaacgcttatgaaaagctatgctgacgttcaccaagtgagtgaagcagacgctcgcttatggctgcagcagctagaagaaaaaggccgatacgcaaaagacgtgtgggctggg

SEQ ID NO: 612 - protein, 1049 aa, synthetic construct
  REGION 1..1049: note = Variant of cytochrome P450
MTIKEMPQPKTFGELKNLPLLNTDKPVQALMRIADELGEIFKFEAPGSVTRFLSSQRLIKEACDESRFDKNLSQGLKFARDFLGDGLFTSWTHEPNWKKAHNILGPSFSQRAMKRYHAMMVDIAWQLVQKWERLNADEHIEVSEDMTRLTLDTIGLCGFNYRFNSFYRDQPHPFIVSVERALDEVMNKLQRANPDDPAYDENKRQCQEDIKVMNDYVDKIIADRKARGEQSHDLLTQMLNGKDPETGEPLDDGNIRYQIITFLIAGHETTSGLLSFALYFLVKNPHVLQKVAEEAARVLVDPVPSYKQVKQLKYVGMVLNEALRLWPTAPAFSLYAKEDTVLGGEYPLTKGDEVMVLIPQLHRDKTIWGDDVEEFRPERFENPSAIPQHAFKPFGNGQRACIGQQFALHEATLVLGMMLKHFDFEDHTNYELVIKEKLTLKPEGFVVKAKSKGIPLGGIPSPSTEQSAKKVRKKAENAHNTPLLVLYGSNAGTAEGTARDLADIAMSKGFAPQVATLDSHAGNLPREGAVLIVTASYNGHPPDNAKQFVDWLDQASADEVKGVRYSVFGCGDKNWAATYQKVPAFIDETLAAKGAENIADRGEADASDDFEGTYEEWSDHMWSDVAAYFNLDIENSEDNKSTLSLQFVDSAADMPLAKMHGAFSTNVVASKELQQPGSARSTRHLEIELPKEASYQEGDHLGVIPRNYEGIVNRVTARFGLSASQQIRLEAEEEKLAHLPLAKTVSVEELLQYVELQDPVTRTQLRAMAAKTVCPPHKVELEALLEKQAYKEQVLAKRLTMLELLEKYPACEMKFSEFIALLPSIRPRYYSISSSPRVDEKQASITVSVVSGPAWSGYGEYKGIASNYLAELQEGDTITCFISTDQSEFTLPKDPETPLIMVGPGTGVAPFRGFVQARKQLKEQGQSLGEAHLYFGCRSPHEDYLYQEELENAQSEGIITLHTAFSRMPNQPKTYVQHVMEQDGKKLIELLDQGAHFYICGDGSQMAPAVEATLMKSYADVHQVSEADARLWLQQLEEKGRYAKDVWAG

SEQ ID NO: 613 - DNA, 3147 bp, synthetic construct
  misc_feature 1..3147: note = Variant of cytochrome P450
  source 1..3147: mol_type = other DNA
atgacaattaaggaaatgcctcagcctaagacgtttggagaacttaaaaatttaccgttattaaacacagataaaccggttcaagctttgatgcgtattgcggatgaattaggagaaatctttaaattcgaggcgcctggtagcgtaacgcgctttttatcaagtcagcgtctaattaaagaagcatgcgatgaatcacgctttgataaaaacttaagtcaaggccttaaatttgcacgtgattttcttggagacgggttatttacaagctggacgcatgaaccgaattggaaaaaagcgcataatatcttaggcccaagctttagtcagcgtgcaatgaaacgttatcatgcgatgatggtcgatatcgccgtgcagcttgttcaaaagtgggagcgtctaaatgcagatgagcatattgaagtatcggaagacatgacacgtttaacgctggatacaattggtctttgcggcttcaactatcgctttaacagcttttaccgagatcagcctcatccatttattgtgagtgttgagcgtgcactggatgaagtaatgaacaagctgcagcgagcaaatccagacgacccagcttatgatgaaaacaagcgccagtgtcaagaagatatcaaggtgatgaacgactatgtcgataaaattattgcagatcgcaaagcaaggggtgaacaaagccatgatttattaacgcagatgctaaacggaaaagatccagaaacgggtgagccgcttgatgacgggaacattcgttatcaaattattacattcttaattgcgggacacgaaacaacaagtggtcttttatcatttgcgctgtatttcttagtgaaaaatccacatgtattacaaaaagtagcagaagaagcagcacgagttctagtagatcctgttccaagctacaaacaagtcaaacagcttaaatatgtcggcatggtcttaaacgaagcgctgcgcttatggccaactgctcctgcgttttccctatatgcaaaagaagatacggtgcttggaggagaatatcctttaaccaaaggcgacgaagtaatggttctgattcctcagcttcaccgtgataaaacaatttggggagacgatgtggaggagttccgtccagagcgttttgaaaatccaagtgcgattccgcagcatgcgtttaaaccgtttggaaacggtcagcgtgcgtgtatcggtcagcagttcgctcttcatgaagcaagtctggtacttggtatgatgctaaaacactttgactttgaagatcatacaaactacgagctcgttattaaagaaaagttaacgttaaaacctgaaggctttgtggtaaaagcaaaatcgaaaggcattccgcttggcggtattccttcacctagcactgaacagtctgctaaaaaagtacgcaaaaaggcagaaaacgctcataatacgccgctgcttgtgctatacggttcaaatgcgggaacagctgaaggaacggcgcgtgatttagcagatattgcaatgagcaaaggatttgcaccgcaggtcgcaacgcttgattcacacgccggaaatcttccgcgcgaaggagctgtattaattgtaacggcgtcttataacggtcatccgcctgataacgcaaagcaatttgtcgactggttagaccaagcgtctgctgatgaagtaaaaggcgttcgctactccgtatttggatgcggcgataaaaactgggctgcgacgtatcaaaaagtgcctgcttttatcgatgaaacgcttgccgctaaaggggcagaaaacatcgctgaccgcggtgaagcagatgcaagcgacgactttgaaggcacatatgaagaatggagtgatcatatgtggagtgacgtagcagcctactttaacctcgacattgaaaacagtgaagataataaatctactctttcacttcaatttgtcgacagcgccgcggatatgccgcttgcgaaaatgcacggtgcgttttcaacgaacgtcgtagcaagcaaagaacttcaacagccaggcagtgcacgaagcacgcgacatcttgaaattgaacttccaaaagaagcttcttatcaagaaggagatcatttaggtgttattcctcgcaactatgaaggaatagtaaaccgtgtaacagcaaggttcggcctaagcgcatcacagcaaatccgtctggaagcagaagaagaaaaattagctcatttgccactcgctaaaacagtatccgtagaagagcttctgcaatacgtggagcttcaagatcctgttacgcgcacgcagcttcgcgcaatggctgctaaaacggtctgcccgccgcataaagtagagcttgaagccttgcttgaaaagcaagcctacaaagaacaagtgctggcaaaacgtttaacaatgcttgaactgcttgaaaaatacccggcgtgtgaaatgaaattcagcgaatttatcgcccttctgccaagcatacgcccgcgctattactcgatttcttcatcacctcgtgtcgatgaaaaacaagcaagcatcacggtcagcgttgtctcaggaccggcgtggagcggatatggagaatataaaggaattgcgtcgaactatcttgccgagctgcaagaaggagatacgattacgtgctttatttccacagatcagtcagaatttacgctgccaaaagaccctgaaacgccgcttatcatggtcggaccgggaacaggcgtcgcgccgtttagaggctttgtgcaggcgcgcaaacagctaaaagaacaaggacagtcacttggagaagcacatttatacttcggctgccgttcacctcatgaagactatctgtatcaagaagagcttgaaaacgcccaaagcgaaggcatcattacgcttcataccgctttttctcgcatgccaaatcagccgaaaacatacgttcagcacgtaatggaacaagacggcaagaaattgattgaacttcttgatcaaggagcgcacttctatatttgcggagacggaagccaaatggcacctgccgttgaagcaacgcttatgaaaagctatgctgacgttcaccaagtgagtgaagcagacgctcgcttatggctgcagcagctagaagaaaaaggccgatacgcaaaagacgtgtgggctggg

SEQ ID NO: 614 - protein, 1049 aa, synthetic construct
  REGION 1..1049: note = Variant of cytochrome P450
MTIKEMPQPKTFGELKNLPLLNTDKPVQALMRIADELGEIFKFEAPGSVTRFLSSQRLIKEACDESRFDKNLSQGLKFARDFLGDGLFTSWTHEPNWKKAHNILGPSFSQRAMKRYHAMMVDIAVQLVQKWERLNADEHIEVSEDMTRLTLDTIGLCGFNYRFNSFYRDQPHPFIVSVERALDEVMNKLQRANPDDPAYDENKRQCQEDIKVMNDYVDKIIADRKARGEQSHDLLTQMLNGKDPETGEPLDDGNIRYQIITFLIAGHETTSGLLSFALYFLVKNPHVLQKVAEEAARVLVDPVPSYKQVKQLKYVGMVLNEALRLWPTAPAFSLYAKEDTVLGGEYPLTKGDEVMVLIPQLHRDKTIWGDDVEEFRPERFENPSAIPQHAFKPFGNGQRACIGQQFALHEASLVLGMMLKHFDFEDHTNYELVIKEKLTLKPEGFVVKAKSKGIPLGGIPSPSTEQSAKKVRKKAENAHNTPLLVLYGSNAGTAEGTARDLADIAMSKGFAPQVATLDSHAGNLPREGAVLIVTASYNGHPPDNAKQFVDWLDQASADEVKGVRYSVFGCGDKNWAATYQKVPAFIDETLAAKGAENIADRGEADASDDFEGTYEEWSDHMWSDVAAYFNLDIENSEDNKSTLSLQFVDSAADMPLAKMHGAFSTNVVASKELQQPGSARSTRHLEIELPKEASYQEGDHLGVIPRNYEGIVNRVTARFGLSASQQIRLEAEEEKLAHLPLAKTVSVEELLQYVELQDPVTRTQLRAMAAKTVCPPHKVELEALLEKQAYKEQVLAKRLTMLELLEKYPACEMKFSEFIALLPSIRPRYYSISSSPRVDEKQASITVSVVSGPAWSGYGEYKGIASNYLAELQEGDTITCFISTDQSEFTLPKDPETPLIMVGPGTGVAPFRGFVQARKQLKEQGQSLGEAHLYFGCRSPHEDYLYQEELENAQSEGIITLHTAFSRMPNQPKTYVQHVMEQDGKKLIELLDQGAHFYICGDGSQMAPAVEATLMKSYADVHQVSEADARLWLQQLEEKGRYAKDVWAG

SEQ ID NO: 615 - DNA, 3147 bp, synthetic construct
  misc_feature 1..3147: note = Variant of cytochrome P450
  source 1..3147: mol_type = other DNA
atgacaattaaggaaatgcctcagcctaagacgtttggagaacttaaaaatttaccgttattaaacacagataaaccggttcaagctttgatgcgtattgcggatgaattaggagaaatctttaaattcgaggcgcctggtagcgtaacgcgctttttatcaagtcagcgtctaattaaagaagcatgcgatgaatcacgctttgataaaaacttaagtcggggccttaaatttgcacgtgattttcttggagacgggttatttacaagctggacgcatgaaccgaattggaaaaaagcgcataatatcttaggcccaagctttagtcagcgtgcaatgaaacgttatcatgcgatgatggtcgatatcgccgtgcagcttgttcaaaagtgggagcgtctaaatgcagatgagcatattgaagtatcggaagacatgacacgtttaacgctggatacaattggtctttgcggcttcaactatcgctttaacagcttttaccgagatcagcctcatccatttattgtgagtgttgagcgtgcactggatgaagtaatgaacaagctgcagcgagcaaatccagacgacccagcttatgatgaaaacaagcgccagtgtcaagaagatatcaaggtgatgaacgactatgtcgataaaattattgcagatcgcaaagcaaggggtgaacaaagccatgatttattaacgcagatgctaaacggaaaagatccagaaacgggtgagccgcttgatgacgggaacattcgttatcaaattattacattcttaattgcgggacacgaaacaacaagtggtcttttatcatttgcgctgtatttcttagtgaaaaatccacatgtattacaaaaagtagcagaagaagcagcacgagttctagtagatcctgttccaagctacaaacaagtcaaacagcttaaatatgtcggcatggtcttaaacgaagcgctgcgcttatggccaactgctcctgcgttttccctatatgcaaaagaagatacggtgcttggaggagaatatcctttaaccaaaggcgacgaagtaatggttctgattcctcagcttcaccgtgataaaacaatttggggagacgatgtggaggagttccgtccagagcgttttgaaaatccaagtgcgattccgcagcatgcgtttaaaccgtttggaaacggtcagcgtgcgtgtatcggtcagcagttcgctcttcatgaagcaacgctggtacttggtatgatgctaaaacactttgactttgaagatcatacaaactacgagctcgttattaaagaaaagttaacgttaaaacctgaaggctttgtggtaaaagcaaaatcgaaaggcattccgcttggcggtattccttcacctagcactgaacagtctgctaaaaaagtacgcaaaaaggcagaaaacgctcataatacgccgctgcttgtgctatacggttcaaatgcgggaacagctgaaggaacggcgcgtgatttagcagatattgcaatgagcaaaggatttgcaccgcaggtcgcaacgcttgattcacacgccggaaatcttccgcgcgaaggagctgtattaattgtaacggcgtcttataacggtcatccgcctgataacgcaaagcaatttgtcgactggttagaccaagcgtctgctgatgaagtaaaaggcgttcgctactccgtatttggatgcggcgataaaaactgggctgcgacgtatcaaaaagtgcctgcttttatcgatgaaacgcttgccgctaaaggggcagaaaacatcgctgaccgcggtgaagcagatgcaagcgacgactttgaaggcacatatgaagaatggagtgatcatatgtggagtgacgtagcagcctactttaacctcgacattgaaaacagtgaagataataaatctactctttcacttcaatttgtcgacagcgccgcggatatgccgcttgcgaaaatgcacggtgcgttttcaacgaacgtcgtagcaagcaaagaacttcaacagccaggcagtgcacgaagcacgcgacatcttgaaattgaacttccaaaagaagcttcttatcaagaaggagatcatttaggtgttattcctcgcaactatgaaggaatagtaaaccgtgtaacagcaaggttcggcctaagcgcatcacagcaaatccgtctggaagcagaagaagaaaaattagctcatttgccactcgctaaaacagtatccgtagaagagcttctgcaatacgtggagcttcaagatcctgttacgcgcacgcagcttcgcgcaatggctgctaaaacggtctgcccgccgcataaagtagagcttgaagccttgcttgaaaagcaagcctacaaagaacaagtgctggcaaaacgtttaacaatgcttgaactgcttgaaaaatacccggcgtgtgaaatgaaattcagcgaatttatcgcccttctgccaagcatacgcccgcgctattactcgatttcttcatcacctcgtgtcgatgaaaaacaagcaagcatcacggtcagcgttgtctcaggaccggcgtggagcggatatggagaatataaaggaattgcgtcgaactatcttgccgagctgcaagaaggagatacgattacgtgctttatttccacagatcagtcagaatttacgctgccaaaagaccctgaaacgccgcttatcatggtcggaccgggaacaggcgtcgcgccgtttagaggctttgtgcaggcgcgcaaacagctaaaagaacaaggacagtcacttggagaagcacatttatacttcggctgccgttcacctcatgaagactatctgtatcaagaagagcttgaaaacgcccaaagcgaaggcatcattacgcttcataccgctttttctcgcatgccaaatcagccgaaaacatacgttcagcacgtaatggaacaagacggcaagaaattgattgaacttcttgatcaaggagcgcacttctatatttgcggagacggaagccaaatggcacctgccgttgaagcaacgcttatgaaaagctatgctgacgttcaccaagtgagtgaagcagacgctcgcttatggctgcagcagctagaagaaaaaggccgatacgcaaaagacgtgtgggctggg

SEQ ID NO: 616 - protein, 1049 aa, synthetic construct
  REGION 1..1049: note = Variant of cytochrome P450
MTIKEMPQPKTFGELKNLPLLNTDKPVQALMRIADELGEIFKFEAPGSVTRFLSSQRLIKEACDESRFDKNLSRGLKFARDFLGDGLFTSWTHEPNWKKAHNILGPSFSQRAMKRYHAMMVDIAVQLVQKWERLNADEHIEVSEDMTRLTLDTIGLCGFNYRFNSFYRDQPHPFIVSVERALDEVMNKLQRANPDDPAYDENKRQCQEDIKVMNDYVDKIIADRKARGEQSHDLLTQMLNGKDPETGEPLDDGNIRYQIITFLIAGHETTSGLLSFALYFLVKNPHVLQKVAEEAARVLVDPVPSYKQVKQLKYVGMVLNEALRLWPTAPAFSLYAKEDTVLGGEYPLTKGDEVMVLIPQLHRDKTIWGDDVEEFRPERFENPSAIPQHAFKPFGNGQRACIGQQFALHEATLVLGMMLKHFDFEDHTNYELVIKEKLTLKPEGFVVKAKSKGIPLGGIPSPSTEQSAKKVRKKAENAHNTPLLVLYGSNAGTAEGTARDLADIAMSKGFAPQVATLDSHAGNLPREGAVLIVTASYNGHPPDNAKQFVDWLDQASADEVKGVRYSVFGCGDKNWAATYQKVPAFIDETLAAKGAENIADRGEADASDDFEGTYEEWSDHMWSDVAAYFNLDIENSEDNKSTLSLQFVDSAADMPLAKMHGAFSTNVVASKELQQPGSARSTRHLEIELPKEASYQEGDHLGVIPRNYEGIVNRVTARFGLSASQQIRLEAEEEKLAHLPLAKTVSVEELLQYVELQDPVTRTQLRAMAAKTVCPPHKVELEALLEKQAYKEQVLAKRLTMLELLEKYPACEMKFSEFIALLPSIRPRYYSISSSPRVDEKQASITVSVVSGPAWSGYGEYKGIASNYLAELQEGDTITCFISTDQSEFTLPKDPETPLIMVGPGTGVAPFRGFVQARKQLKEQGQSLGEAHLYFGCRSPHEDYLYQEELENAQSEGIITLHTAFSRMPNQPKTYVQHVMEQDGKKLIELLDQGAHFYICGDGSQMAPAVEATLMKSYADVHQVSEADARLWLQQLEEKGRYAKDVWAG

SEQ ID NO: 617 - DNA, 3147 bp, synthetic construct
  misc_feature 1..3147: note = Variant of cytochrome P450
  source 1..3147: mol_type = other DNA
atgacaattaaggaaatgcctcagcctaagacgtttggagaacttaaaaatttaccgttattaaacacagataaaccggttcaagctttgatgcgtattgcggatgaattaggagaaatctttaaattcgaggcgcctggtagcgtaacgcgctttttatcaagtcagcgtctaattaaagaagcatgcgatgaatcacgctttgataaaaacttaagtcaaggccttaaatttgcacgtgattttcttggagacgggttatttacaagctggacgcatgaaccgaattggaaaaaagcgcataatatcttaggcccaagctttagtcagcgtgcaatgaaacgttatcatgcgatgatggtcgatatcgccgtgcagcttgttcaaaagtgggagcgtctaaatgcagatgagcatattgaagtatcggaagacatgacacgtttaacgctggatacaattggtctttgcggcttcaactatcgctttaacagcttttaccgagatcagcctcatccatttattgtgagtgttgagcgtgcactggatgaagtaatgaacaagctgcagcgagcaaatccagacgacccagcttatgatgaaaacaagcgccagtgtcaagaagatatcaaggtgatgaacgactatgtcgataaaattattgcagatcgcaaagcaaggggtgaacaaagccatgatttattaacgcagatgctaaacggaaaagatccagaaacgggtgagccgctcgatgacgggaacattcgttatcaaattattacattcttaattgcgggacacgaaacaacaagtggtcttttatcatttgcgctgtatttcttagtgaaaaatccacatgtattacaaaaagtagcagaagaagcagcacgagttctagtagatcctgttccaagctacaaacaagtcaaacagcttaaatatgtcggcatggtcttaaacgaagcgctgcgcttatggccaactgctcctgcgttttccctatatgcaaaagaagatacggtgcttggaggagaatatcctttaaccaaaggcgacgaagtaatggttctgattcctcagcttcaccgtgataaaacaatttggggagacgatgtggagtctttccgtccagagcgttttgaaaatccaagtgcgattccgcagcatgcgtttaaaccgtttggaaacggtcagcgtgcgtgtatcggtcagcagttcgctcttcatgaagcaacgctggtacttggtatgatgctaaaacactttgactttgaagatcatacaaactacgagctcgttattaaagaaaagttaacgttaaaacctgaaggctttgtggtaaaagcaaaatcgaaaggcattccgcttggcggtattccttcacctagcactgaacagtctgctaaaaaagtacgcaaaaaggcagaaaacgctcataatacgccgctgcttgtgctatacggttcaaatgcgggaacagctgaaggaacggcgcgtgatttagcagatattgcaatgagcaaaggatttgcaccgcaggtcgcaacgcttgattcacacgccggaaatcttccgcgcgaaggagctgtattaattgtaacggcgtcttataacggtcatccgcctgataacgcaaagcaatttgtcgactggttagaccaagcgtctgctgatgaagtaaaaggcgttcgctactccgtatttggatgcggcgataaaaactgggctgcgacgtatcaaaaagtgcctgcttttatcgatgaaacgcttgccgctaaaggggcagaaaacatcgctgaccgcggtgaagcagatgcaagcgacgactttgaaggcacatatgaagaatggagtgatcatatgtggagtgacgtagcagcctactttaacctcgacattgaaaacagtgaagataataaatctactctttcacttcaatttgtcgacagcgccgcggatatgccgcttgcgaaaatgcacggtgcgttttcaacgaacgtcgtagcaagcaaagaacttcaacagccaggcagtgcacgaagcacgcgacatcttgaaattgaacttccaaaagaagcttcttatcaagaaggagatcatttaggtgttattcctcgcaactatgaaggaatagtaaaccgtgtaacagcaaggttcggcctaagcgcatcacagcaaatccgtctggaagcagaagaagaaaaattagctcatttgccactcgctaaaacagtatccgtagaagagcttctgcaatacgtggagcttcaagatcctgttacgcgcacgcagcttcgcgcaatggctgctaaaacggtctgcccgccgcataaagtagagcttgaagccttgcttgaaaagcaagcctacaaagaacaagtgctggcaaaacgtttaacaatgcttgaactgcttgaaaaatacccggcgtgtgaaatgaaattcagcgaatttatcgcccttctgccaagcatacgcccgcgctattactcgatttcttcatcacctcgtgtcgatgaaaaacaagcaagcatcacggtcagcgttgtctcaggaccggcgtggagcggatatggagaatataaaggaattgcgtcgaactatcttgccgagctgcaagaaggagatacgattacgtgctttatttccacagatcagtcagaatttacgctgccaaaagaccctgaaacgccgcttatcatggtcggaccgggaacaggcgtcgcgccgtttagaggctttgtgcaggcgcgcaaacagctaaaagaacaaggacagtcacttggagaagcacatttatacttcggctgccgttcacctcatgaagactatctgtatcaagaagagcttgaaaacgcccaaagcgaaggcatcattacgcttcataccgctttttctcgcatgccaaatcagccgaaaacatacgttcagcacgtaatggaacaagacggcaagaaattgattgaacttcttgatcaaggagcgcacttctatatttgcggagacggaagccaaatggcacctgccgttgaagcaacgcttatgaaaagctatgctgacgttcaccaagtgagtgaagcagacgctcgcttatggctgcagcagctagaagaaaaaggccgatacgcaaaagacgtgtgggctggg

SEQ ID NO: 618 - protein, 1049 aa, synthetic construct
  REGION 1..1049: note = Variant of cytochrome P450
MTIKEMPQPKTFGELKNLPLLNTDKPVQALMRIADELGEIFKFEAPGSVTRFLSSQRLIKEACDESRFDKNLSQGLKFARDFLGDGLFTSWTHEPNWKKAHNILGPSFSQRAMKRYHAMMVDIAVQLVQKWERLNADEHIEVSEDMTRLTLDTIGLCGFNYRFNSFYRDQPHPFIVSVERALDEVMNKLQRANPDDPAYDENKRQCQEDIKVMNDYVDKIIADRKARGEQSHDLLTQMLNGKDPETGEPLDDGNIRYQIITFLIAGHETTSGLLSFALYFLVKNPHVLQKVAEEAARVLVDPVPSYKQVKQLKYVGMVLNEALRLWPTAPAFSLYAKEDTVLGGEYPLTKGDEVMVLIPQLHRDKTIWGDDVESFRPERFENPSAIPQHAFKPFGNGQRACIGQQFALHEATLVLGMMLKHFDFEDHTNYELVIKEKLTLKPEGFVVKAKSKGIPLGGIPSPSTEQSAKKVRKKAENAHNTPLLVLYGSNAGTAEGTARDLADIAMSKGFAPQVATLDSHAGNLPREGAVLIVTASYNGHPPDNAKQFVDWLDQASADEVKGVRYSVFGCGDKNWAATYQKVPAFIDETLAAKGAENIADRGEADASDDFEGTYEEWSDHMWSDVAAYFNLDIENSEDNKSTLSLQFVDSAADMPLAKMHGAFSTNVVASKELQQPGSARSTRHLEIELPKEASYQEGDHLGVIPRNYEGIVNRVTARFGLSASQQIRLEAEEEKLAHLPLAKTVSVEELLQYVELQDPVTRTQLRAMAAKTVCPPHKVELEALLEKQAYKEQVLAKRLTMLELLEKYPACEMKFSEFIALLPSIRPRYYSISSSPRVDEKQASITVSVVSGPAWSGYGEYKGIASNYLAELQEGDTITCFISTDQSEFTLPKDPETPLIMVGPGTGVAPFRGFVQARKQLKEQGQSLGEAHLYFGCRSPHEDYLYQEELENAQSEGIITLHTAFSRMPNQPKTYVQHVMEQDGKKLIELLDQGAHFYICGDGSQMAPAVEATLMKSYADVHQVSEADARLWLQQLEEKGRYAKDVWAG

SEQ ID NO: 619 - DNA, 3147 bp, synthetic construct
  misc_feature 1..3147: note = Variant of cytochrome P450
  source 1..3147: mol_type = other DNA
atgacaattaaggaaatgcctcagcctaagacgtttggagaacttaaaaatttaccgttattaaacacagataaaccggttcaagctttgatgcgtattgcggatgaattaggagaaatctttaaattcgaggcgcctggtagcgtaacgcgctttttatcaagtcagcgtctaattaaagaagcatgcgatgaacgtcgctttgataaaaacttaagtcaaggccttaaatttgcacgtgattttcttggagacgggttatttacaagctggacgcatgaaccgaattggaaaaaagcgcataatatcttaggcccaagctttagtcagcgtgcaatgaaacgttatcatgcgatgatggtcgatatcgccgtgcagcttgttcaaaagtgggagcgtctaaatgcagatgagcatattgaagtatcggaagacatgacacgtttaacgctggatacaattggtctttgcggcttcaactatcgctttaacagcttttaccgagatcagcctcatccatttattgtgagtgttgagcgtgcactggatgaagtaatgaacaagctgcagcgagcaaatccagacgacccagcttatgatgaaaacaagcgccagtgtcaagaagacatcaaggtgatgaacgactatgtcgataaaattattgcagatcgcaaagcaaggggtgaacaaagccatgatttattaacgcagatgctaaacggaaaagatccagaaacgggtgagccgcttgatgacgggaacattcgttatcaaattattacattcttaattgcgggacacgaaacaacaagtggtcttttatcatttgcgctgtatttcttagtgaaaaatccacatgtattacaaaaagtagcagaagaagcagcacgagttctagtagatcctgttccaagctacaaacaagtcaaacagcttaaatatgtcggcatggtcttaaacgaagcgctgcgcttatggccaactgctcctgcgttttccctatatgcaaaagaagatacggtgcttggaggagaatatcctttaaccaaaggcgacgaagtaatggttctgattcctcagcttcaccgtgataaaacaatttggggagacgatgtggaggagttccgtccagagcgttttgaaaatccaagtgcgattccgcagcatgcgtttaaaccgtttggaaacggtcagcgtgcgtgtatcggttggcagttcgctcttcatgaagcaacgctggtacttggtatgatgctaaaacactttgactttgaagatcatacaaactacgagctcgttattaaagaactgttaacgttaaaacctgaaggctttgtggtaaaagcaaaatcgaaaggcattccgcttggcctgattccttcacctagcactgaacagtctgctaaaaaagtacgcaaaaaggcagaaaacgctcataatacgccgctgcttgtgctatacggttcaaatgcgggaacagctgaaggaacggcgcgtgatttagcagatattgcaatgagcaaaggatttgcaccgcaggtcgcaacgcttgattcacacgccggaaatcttccgcgcgaaggagctgtattaattgtaacggcgtcttataacggtcatccgcctgataacgcaaagcaatttgtcgactggttagaccaagcgtctgctgatgaagtaaaaggcgttcgctactccgtatttggatgcggcgataaaaactgggctgcgacgtatcaaaaagtgcctgcttttatcgatgaaacgcttgccgctaaaggggcagaaaacatcgctgaccgcggtgaagcagatgcaagcgacgactttgaaggcacatatgaagaatggagtgatcatatgtggagtgacgtagcagcctactttaacctcgacattgaaaacagtgaagataataaatctactctttcacttcaatttgtcgacagcgccgcggatatgccgcttgcgaaaatgcacggtgcgttttcaacgaacgtcgtagcaagcaaagaacttcaacagccaggcagtgcacgaagcacgcgacatcttgaaattgaacttccaaaagaagcttcttatcaagaaggagatcatttaggtgttattcctcgcaactatgaaggaatagtaaaccgtgtaacagcaaggttcggcctaagcgcatcacagcaaatccgtctggaagcagaagaagaaaaattagctcatttgccactcgctaaaacagtatccgtagaagagcttctgcaatacgtggagcttcaagatcctgttacgcgcacgcagcttcgcgcaatggctgctaaaacggtctgcccgccgcataaagtagagcttgaagccttgcttgaaaagcaagcctacaaagaacaagtgctggcaaaacgtttaacaatgcttgaactgcttgaaaaatacccggcgtgtgaaatgaaattcagcgaatttatcgcccttctgccaagcatacgcccgcgctattactcgatttcttcatcacctcgtgtcgatgaaaaacaagcaagcatcacggtcagcgttgtctcaggaccggcgtggagcggatatggagaatataaaggaattgcgtcgaactatcttgccgagctgcaagaaggagatacgattacgtgctttatttccacagatcagtcagaatttacgctgccaaaagaccctgaaacgccgcttatcatggtcggaccgggaacaggcgtcgcgccgtttagaggctttgtgcaggcgcgcaaacagctaaaagaacaaggacagtcacttggagaagcacatttatacttcggctgccgttcacctcatgaagactatctgtatcaagaagagcttgaaaacgcccaaagcgaaggcatcattacgcttcataccgctttttctcgcatgccaaatcagccgaaaacatacgttcagcacgtaatggaacaagacggcaagaaattgattgaacttcttgatcaaggagcgcacttctatatttgcggagacggaagccaaatggcacctgccgttgaagcaacgcttatgaaaagctatgctgacgttcaccaagtgagtgaagcagacgctcgcttatggctgcagcagctagaagaaaaaggccgatacgcaaaagacgtgtgggctggg

SEQ ID NO: 620 - protein, 1049 aa, synthetic construct
  REGION 1..1049: note = Variant of cytochrome P450
MTIKEMPQPKTFGELKNLPLLNTDKPVQALMRIADELGEIFKFEAPGSVTRFLSSQRLIKEACDERRFDKNLSQGLKFARDFLGDGLFTSWTHEPNWKKAHNILGPSFSQRAMKRYHAMMVDIAVQLVQKWERLNADEHIEVSEDMTRLTLDTIGLCGFNYRFNSFYRDQPHPFIVSVERALDEVMNKLQRANPDDPAYDENKRQCQEDIKVMNDYVDKIIADRKARGEQSHDLLTQMLNGKDPETGEPLDDGNIRYQIITFLIAGHETTSGLLSFALYFLVKNPHVLQKVAEEAARVLVDPVPSYKQVKQLKYVGMVLNEALRLWPTAPAFSLYAKEDTVLGGEYPLTKGDEVMVLIPQLHRDKTIWGDDVEEFRPERFENPSAIPQHAFKPFGNGQRACIGWQFALHEATLVLGMMLKHFDFEDHTNYELVIKELLTLKPEGFVVKAKSKGIPLGLIPSPSTEQSAKKVRKKAENAHNTPLLVLYGSNAGTAEGTARDLADIAMSKGFAPQVATLDSHAGNLPREGAVLIVTASYNGHPPDNAKQFVDWLDQASADEVKGVRYSVFGCGDKNWAATYQKVPAFIDETLAAKGAENIADRGEADASDDFEGTYEEWSDHMWSDVAAYFNLDIENSEDNKSTLSLQFVDSAADMPLAKMHGAFSTNVVASKELQQPGSARSTRHLEIELPKEASYQEGDHLGVIPRNYEGIVNRVTARFGLSASQQIRLEAEEEKLAHLPLAKTVSVEELLQYVELQDPVTRTQLRAMAAKTVCPPHKVELEALLEKQAYKEQVLAKRLTMLELLEKYPACEMKFSEFIALLPSIRPRYYSISSSPRVDEKQASITVSVVSGPAWSGYGEYKGIASNYLAELQEGDTITCFISTDQSEFTLPKDPETPLIMVGPGTGVAPFRGFVQARKQLKEQGQSLGEAHLYFGCRSPHEDYLYQEELENAQSEGIITLHTAFSRMPNQPKTYVQHVMEQDGKKLIELLDQGAHFYICGDGSQMAPAVEATLMKSYADVHQVSEADARLWLQQLEEKGRYAKDVWAG

SEQ ID NO: 621 - DNA, 3147 bp, synthetic construct
  misc_feature 1..3147: note = Variant of cytochrome P450
  source 1..3147: mol_type = other DNA
atgacaattaaggaaatgcctcagcctaagacgtttggagaacttaaaaatttaccgttattaaacacagataaaccggttcaagctttgatgcgtattgcggatgaattaggagaaatctttaaattcgaggcgcctggtagcgtaacgcgctttttatcaagtcagcgtctaattaaagaagcatgcgatgaatcacgctttgataaaaacttaagtcaaggccttaaatttgcacgtgattttcttggagacgggttatttacaagctggacgcatgaaccgaattggaaaaaagcgcataatatcttaggcccaagctttagtcagcgtgcaatgaaacgttatcatgcgatgatggtcgatatcgccgtgcagcttgttcaaaagtgggagcgtctaaatgcagatgagcatattgaagtatcggaagacatgacacgtttaacgctggatacaattggtctttgcggcttcaactatcgctttaacagcttttaccgagatcaggggcatccatttattgtgagtgttgagcgtgcactggatgaagtaatgaacaagctgcagcgagcaaatccagacgacccagcttatgatgaaaacaagcgccagtgtcaagaagatatcaaggtgatgaacgactatgtcgataaaattattgcagatcgcaaagcaaggggtgaacaaagccatgatttattaacgcagatgctaaacggaaaagatccagaaacgggtgagccgcttgatgacgggaacattcgttatcaaattattacattcttaattgcgggacacgaaacaacaagtggtcttttatcatttgcgctgtatttcttagtgaaaaatccacatgtattacaaaaagtagcagaagaagcagcacgagttctagtagatcctgttccaagctacaaacaagtcaaacagcttaaatatgtcggcatggtcttaaacgaagcgctgcgcttatggccaactgctcctgcgttttccctatatgcaaaagaagatacggtgcttggaggagaatatcctttaaccaaaggcgacgaagtaatggttctgattcctcagcttcaccgtgataaaacaatttggggagacgatgtggaggagttccgtccagagcgttttgaaaatccaagtgcgattccgcagcatgcgtttaaaccgtttggaaacggtcagcgtgcgtgtatcggtcagcagttcgctcttcatgaagcaacgctggtacttggtatgatgctaaaacactttgactttgaagatcatacaaactacgagctcgttattaaagaaaagttaacgttaaaacctgaaggctttgtggtaaaagcaaaatcgaaaggcattccgcttggcggtattccttcacctagcactgaacagtctgctaaaaaagtacgcaaaaaggcagaaaacgctcataatacgccgctgcttgtgctatacggttcaaatgcgggaacagctgaaggaacggcgcgtgatttagcagatattgcaatgagcaaaggatttgcaccgcaggtcgcaacgcttgattcacacgccggaaatcttccgcgcgaaggagctgtattaattgtaacggcgtcttataacggtcatccgcctgataacgcaaagcaatttgtcgactggttagaccaagcgtctgctgatgaagtaaaaggcgttcgctactccgtatttggatgcggcgataaaaactgggctgcgacgtatcaaaaagtgcctgcttttatcgatgaaacgcttgccgctaaaggggcagaaaacatcgctgaccgcggtgaagcagatgcaagcgacgactttgaaggcacatatgaagaatggagtgatcatatgtggagtgacgtagcagcctactttaacctcgacattgaaaacagtgaagataataaatctactctttcacttcaatttgtcgacagcgccgcggatatgccgcttgcgaaaatgcacggtgcgttttcaacgaacgtcgtagcaagcaaagaacttcaacagccaggcagtgcacgaagcacgcgacatcttgaaattgaacttccaaaagaagcttcttatcaagaaggagatcatttaggtgttattcctcgcaactatgaaggaatagtaaaccgtgtaacagcaaggttcggcctaagcgcatcacagcaaatccgtctggaagcagaagaagaaaaattagctcatttgccactcgctaaaacagtatccgtagaagagcttctgcaatacgtggagcttcaagatcctgttacgcgcacgcagcttcgcgcaatggctgctaaaacggtctgcccgccgcataaagtagagcttgaagccttgcttgaaaagcaagcctacaaagaacaagtgctggcaaaacgtttaacaatgcttgaactgcttgaaaaatacccggcgtgtgaaatgaaattcagcgaatttatcgcccttctgccaagcatacgcccgcgctattactcgatttcttcatcacctcgtgtcgatgaaaaacaagcaagcatcacggtcagcgttgtctcaggaccggcgtggagcggatatggagaatataaaggaattgcgtcgaactatcttgccgagctgcaagaaggagatacgattacgtgctttatttccacagatcagtcagaatttacgctgccaaaagaccctgaaacgccgcttatcatggtcggaccgggaacaggcgtcgcgccgtttagaggctttgtgcaggcgcgcaaacagctaaaagaacaaggacagtcacttggagaagcacatttatacttcggctgccgttcacctcatgaagactatctgtatcaagaagagcttgaaaacgcccaaagcgaaggcatcattacgcttcataccgctttttctcgcatgccaaatcagccgaaaacatacgttcagcacgtaatggaacaagacggcaagaaattgattgaacttcttgatcaaggagcgcacttctatatttgcggagacggaagccaaatggcacctgccgttgaagcaacgcttatgaaaagctatgctgacgttcaccaagtgagtgaagcagacgctcgcttatggctgcagcagctagaagaaaaaggccgatacgcaaaagacgtgtgggctggg

SEQ ID NO: 622 - protein, 1049 aa, synthetic construct
  REGION 1..1049: note = Variant of cytochrome P450
MTIKEMPQPKTFGELKNLPLLNTDKPVQALMRIADELGEIFKFEAPGSVTRFLSSQRLIKEACDESRFDKNLSQGLKFARDFLGDGLFTSWTHEPNWKKAHNILGPSFSQRAMKRYHAMMVDIAVQLVQKWERLNADEHIEVSEDMTRLTLDTIGLCGFNYRFNSFYRDQGHPFIVSVERALDEVMNKLQRANPDDPAYDENKRQCQEDIKVMNDYVDKIIADRKARGEQSHDLLTQMLNGKDPETGEPLDDGNIRYQIITFLIAGHETTSGLLSFALYFLVKNPHVLQKVAEEAARVLVDPVPSYKQVKQLKYVGMVLNEALRLWPTAPAFSLYAKEDTVLGGEYPLTKGDEVMVLIPQLHRDKTIWGDDVEEFRPERFENPSAIPQHAFKPFGNGQRACIGQQFALHEATLVLGMMLKHFDFEDHTNYELVIKEKLTLKPEGFVVKAKSKGIPLGGIPSPSTEQSAKKVRKKAENAHNTPLLVLYGSNAGTAEGTARDLADIAMSKGFAPQVATLDSHAGNLPREGAVLIVTASYNGHPPDNAKQFVDWLDQASADEVKGVRYSVFGCGDKNWAATYQKVPAFIDETLAAKGAENIADRGEADASDDFEGTYEEWSDHMWSDVAAYFNLDIENSEDNKSTLSLQFVDSAADMPLAKMHGAFSTNVVASKELQQPGSARSTRHLEIELPKEASYQEGDHLGVIPRNYEGIVNRVTARFGLSASQQIRLEAEEEKLAHLPLAKTVSVEELLQYVELQDPVTRTQLRAMAAKTVCPPHKVELEALLEKQAYKEQVLAKRLTMLELLEKYPACEMKFSEFIALLPSIRPRYYSISSSPRVDEKQASITVSVVSGPAWSGYGEYKGIASNYLAELQEGDTITCFISTDQSEFTLPKDPETPLIMVGPGTGVAPFRGFVQARKQLKEQGQSLGEAHLYFGCRSPHEDYLYQEELENAQSEGIITLHTAFSRMPNQPKTYVQHVMEQDGKKLIELLDQGAHFYICGDGSQMAPAVEATLMKSYADVHQVSEADARLWLQQLEEKGRYAKDVWAG

SEQ ID NO: 623 - DNA, 3147 bp, synthetic construct
  misc_feature 1..3147: note = Variant of cytochrome P450
  source 1..3147: mol_type = other DNA
atgacaattaaggaaatgcctcagcctaagacgtttggagaacttaaaaatttaccgttattaaacacagataaaccggttcaagctttgatgcgtattgcggatgaattaggagaaatctttaaattcgaggcgcctggtagcgtaacgcgctttttatcaagtcagcgtctaattaaagaagcatgcgatgaatcacgctttgataaaaacttaagtcaaggccttaaatttgcacgtgattttcttggagacgggttatttacaagctggacgcatgaaccgaattggaaaaaagcgcataatatcttaggcccaagctttagtcagcgtgcaatgaaacgttatcatgcgatgatggtcgatatcgccgtgcagcttgttcaaaagtgggagcgtctaaatgcagatgagcatattgaagtatcggaagacatgacacgtttaacgctggatacaattggtctttgcggcttcaactatcgctttaacagcttttaccgagatcagcctcatccatttattgtgagtgttgagcgtgcactggatgaagtaatgaacaagctgcagcgagcaaatccagacgacccagcttatgatgaaaacaagcgccagtgtcaagaagatatcaaggtgatgaacgactatgtcgataaaattattgcagatcgcaaagcaaggggtgaacaaagccatgatttattaacgcagatgctaaacggaaaagatccagaaacgggtgagccgcttgatgacgggaacattcgttatcaaattattacattcttaattgcgggacacgaaacaacaagtggtcttttatcatttgcgctgtatttcttagtgaaaaatccacatgtattacaaaaagtagcagaagaagcagcacgagttctagtagatcctgttccaagctacaaacaagtcaaacagcttaaatatgtcggcatggtcttaaacgaagcgctgcgcttatggccaactgctcctgcgttttccctatatgcaaaagaagatacggtgcttggaggagaatatcctttaaccaaaggcgacgaagtaatggttctgattcctcagcttcaccgtgataaaacaatttggggagacgatgtggaggagttccgtccagagcgttttgaaaatccaagtgcgattccgcagcatgcgtttaaaccgtttggaaacggtcagcgtgcgtgtatcggtcagcagttcgctcttcatgaagcagttctggtacttggtatgatgctaaaacactttgactttgaagatcatacaaactacgagctcgttattaaagaaaagttaacgttaaaacctgaaggctttgtggtaaaagcaaaatcgaaaggcattccgcttggcggtattccttcacctagcactgaacagtctgctaaaaaagtacgcaaaaaggcagaaaacgctcataatacgccgctgcttgtgctatacggttcaaatgcgggaacagctgaaggaacggcgcgtgatttagcagatattgcaatgagcaaaggatttgcaccgcaggtcgcaacgcttgattcacacgccggaaatcttccgcgcgaaggagctgtattaattgtaacggcgtcttataacggtcatccgcctgataacgcaaagcaatttgtcgactggttagaccaagcgtctgctgatgaagtaaaaggcgttcgctactccgtatttggatgcggcgataaaaactgggctgcgacgtatcaaaaagtgcctgcttttatcgatgaaacgcttgccgctaaaggggcagaaaacatcgctgaccgcggtgaagcagatgcaagcgacgactttgaaggcacatatgaagaatggagtgatcatatgtggagtgacgtagcagcctactttaacctcgacattgaaaacagtgaagataataaatctactctttcacttcaatttgtcgacagcgccgcggatatgccgcttgcgaaaatgcacggtgcgttttcaacgaacgtcgtagcaagcaaagaacttcaacagccaggcagtgcacgaagcacgcgacatcttgaaattgaacttccaaaagaagcttcttatcaagaaggagatcatttaggtgttattcctcgcaactatgaaggaatagtaaaccgtgtaacagcaaggttcggcctaagcgcatcacagcaaatccgtctggaagcagaagaagaaaaattagctcatttgccactcgctaaaacagtatccgtagaagagcttctgcaatacgtggagcttcaagatcctgttacgcgcacgcagcttcgcgcaatggctgctaaaacggtctgcccgccgcataaagtagagcttgaagccttgcttgaaaagcaagcctacaaagaacaagtgctggcaaaacgtttaacaatgcttgaactgcttgaaaaatacccggcgtgtgaaatgaaattcagcgaatttatcgcccttctgccaagcatacgcccgcgctattactcgatttcttcatcacctcgtgtcgatgaaaaacaagcaagcatcacggtcagcgttgtctcaggaccggcgtggagcggatatggagaatataaaggaattgcgtcgaactatcttgccgagctgcaagaaggagatacgattacgtgctttatttccacagatcagtcagaatttacgctgccaaaagaccctgaaacgccgcttatcatggtcggaccgggaacaggcgtcgcgccgtttagaggctttgtgcaggcgcgcaaacagctaaaagaacaaggacagtcacttggagaagcacatttatacttcggctgccgttcacctcatgaagactatctgtatcaagaagagcttgaaaacgcccaaagcgaaggcatcattacgcttcataccgctttttctcgcatgccaaatcagccgaaaacatacgttcagcacgtaatggaacaagacggcaagaaattgattgaacttcttgatcaaggagcgcacttctatatttgcggagacggaagccaaatggcacctgccgttgaagcaacgcttatgaaaagctatgctgacgttcaccaagtgagtgaagcagacgctcgcttatggctgcagcagctagaagaaaaaggccgatacgcaaaagacgtgtgggctggg

SEQ ID NO: 624 - protein, 1049 aa, synthetic construct
  REGION 1..1049: note = Variant of cytochrome P450
MTIKEMPQPKTFGELKNLPLLNTDKPVQALMRIADELGEIFKFEAPGSVTRFLSSQRLIKEACDESRFDKNLSQGLKFARDFLGDGLFTSWTHEPNWKKAHNILGPSFSQRAMKRYHAMMVDIAVQLVQKWERLNADEHIEVSEDMTRLTLDTIGLCGFNYRFNSFYRDQPHPFIVSVERALDEVMNKLQRANPDDPAYDENKRQCQEDIKVMNDYVDKIIADRKARGEQSHDLLTQMLNGKDPETGEPLDDGNIRYQIITFLIAGHETTSGLLSFALYFLVKNPHVLQKVAEEAARVLVDPVPSYKQVKQLKYVGMVLNEALRLWPTAPAFSLYAKEDTVLGGEYPLTKGDEVMVLIPQLHRDKTIWGDDVEEFRPERFENPSAIPQHAFKPFGNGQRACIGQQFALHEAVLVLGMMLKHFDFEDHTNYELVIKEKLTLKPEGFVVKAKSKGIPLGGIPSPSTEQSAKKVRKKAENAHNTPLLVLYGSNAGTAEGTARDLADIAMSKGFAPQVATLDSHAGNLPREGAVLIVTASYNGHPPDNAKQFVDWLDQASADEVKGVRYSVFGCGDKNWAATYQKVPAFIDETLAAKGAENIADRGEADASDDFEGTYEEWSDHMWSDVAAYFNLDIENSEDNKSTLSLQFVDSAADMPLAKMHGAFSTNVVASKELQQPGSARSTRHLEIELPKEASYQEGDHLGVIPRNYEGIVNRVTARFGLSASQQIRLEAEEEKLAHLPLAKTVSVEELLQYVELQDPVTRTQLRAMAAKTVCPPHKVELEALLEKQAYKEQVLAKRLTMLELLEKYPACEMKFSEFIALLPSIRPRYYSISSSPRVDEKQASITVSVVSGPAWSGYGEYKGIASNYLAELQEGDTITCFISTDQSEFTLPKDPETPLIMVGPGTGVAPFRGFVQARKQLKEQGQSLGEAHLYFGCRSPHEDYLYQEELENAQSEGIITLHTAFSRMPNQPKTYVQHVMEQDGKKLIELLDQGAHFYICGDGSQMAPAVEATLMKSYADVHQVSEADARLWLQQLEEKGRYAKDVWAG

SEQ ID NO: 625 - DNA, 3147 bp, synthetic construct
  misc_feature 1..3147: note = Variant of cytochrome P450
  source 1..3147: mol_type = other DNA
atgacaattaaggaaatgcctcagcctaagacgtttggagaacttaaaaatttaccgttattaaacacagataaaccggttcaagctttgatgcgtattgcggatgaattaggagaaatctttaaattcgaggcgcctggtagcgtaacgcgctttttatcaagtcagcgtctaattaaagaagcatgcgatgaatcacgctttgataaaaacttaagtcaaggccttaaatttgcacgtgattttcttggagacgggttatttacaagctggacgcatgaaccgaattggaaaaaagcgcataatatcttaggcccaagctttagtcagcgtgcaatgaaacgttatcatgcgatgatggtcgatatcgccgtgcagcttgttcaaaagtgggagcgtctaaatgcagatgagcatattgaagtatcggaagacatgacacgtttaacgctggatacaattggtctttgcggcttcaactatcgctttaacagcttttaccgagatcagcctcatccatttattgtgagtgttgagcgtgcactggatgaagtaatgaacaagctgcagcgagcaaatccagacgacccagcttatgatgaaaacaagcgccagtgtcaagaagatatcaaggtgatgaacgactatgtcgataaaattattgcagatcgcaaagcaaggggtgaacaaagccatgatttattaacgcagatgctaaacggaaaagatccagaaacgggtgagccgcttgatgacgggaacattcgttatcaaattattacattcttaattgcgggacacgaaacaacaagtggtcttttatcatttgcgctgtatttcttagtgaaaaatccacatgtattacaaaaagtagcagaagaagcagcacgagttctagtagatcctgttccaagctacaaacaagtcaaacagcttaaatatgtcggcatggtcttaaacgaagcgctgcgcttatggccaactgctcctgcgttttccctatatgcaaaagaagatacggtgcttggaggagaatatcctttaaccaaaggcgacgaagtaatggttctgattcctcagcttcaccgtgataaaacaatttggggagacgatgtggaggagttccgtccagagcgttttgaaaatccaagtgcgattccgcagcatgcgtttaaaccgtttggaaacggtcagcgtgcgtgtatcggtcagcagttcgctcttcatgaagcaaatctggtacttggtatgatgctaaaacactttgactttgaagatcatacaaactacgagctcgttattaaagaaaagttaacgttaaaacctgaaggctttgtggtaaaagcaaaatcgaaaggcattccgcttggcggtattccttcacctagcactgaacagtctgctaaaaaagtacgcaaaaaggcagaaaacgctcataatacgccgctgcttgtgctatacggttcaaatgcgggaacagctgaaggaacggcgcgtgatttagcagatattgcaatgagcaaaggatttgcaccgcaggtcgcaacgcttgattcacacgccggaaatcttccgcgcgaaggagctgtattaattgtaacggcgtcttataacggtcatccgcctgataacgcaaagcaatttgtcgactggttagaccaagcgtctgctgatgaagtaaaaggcgttcgctactccgtatttggatgcggcgataaaaactgggctgcgacgtatcaaaaagtgcctgcttttatcgatgaaacgcttgccgctaaaggggcagaaaacatcgctgaccgcggtgaagcagatgcaagcgacgactttgaaggcacatatgaagaatggagtgatcatatgtggagtgacgtagcagcctactttaacctcgacattgaaaacagtgaagataataaatctactctttcacttcaatttgtcgacagcgccgcggatatgccgcttgcgaaaatgcacggtgcgttttcaacgaacgtcgtagcaagcaaagaacttcaacagccaggcagtgcacgaagcacgcgacatcttgaaattgaacttccaaaagaagcttcttatcaagaaggagatcatttaggtgttattcctcgcaactatgaaggaatagtaaaccgtgtaacagcaaggttcggcctaagcgcatcacagcaaatccgtctggaagcagaagaagaaaaattagctcatttgccactcgctaaaacagtatccgtagaagagcttctgcaatacgtggagcttcaagatcctgttacgcgcacgcagcttcgcgcaatggctgctaaaacggtctgcccgccgcataaagtagagcttgaagccttgcttgaaaagcaagcctacaaagaacaagtgctggcaaaacgtttaacaatgcttgaactgcttgaaaaatacccggcgtgtgaaatgaaattcagcgaatttatcgcccttctgccaagcatacgcccgcgctattactcgatttcttcatcacctcgtgtcgatgaaaaacaagcaagcatcacggtcagcgttgtctcaggaccggcgtggagcggatatggagaatataaaggaattgcgtcgaactatcttgccgagctgcaagaaggagatacgattacgtgctttatttccacagatcagtcagaatttacgctgccaaaagaccctgaaacgccgcttatcatggtcggaccgggaacaggcgtcgcgccgtttagaggctttgtgcaggcgcgcaaacagctaaaagaacaaggacagtcacttggagaagcacatttatacttcggctgccgttcacctcatgaagactatctgtatcaagaagagcttgaaaacgcccaaagcgaaggcatcattacgcttcataccgctttttctcgcatgccaaatcagccgaaaacatacgttcagcacgtaatggaacaagacggcaagaaattgattgaacttcttgatcaaggagcgcacttctatatttgcggagacggaagccaaatggcacctgccgttgaagcaacgcttatgaaaagctatgctgacgttcaccaagtgagtgaagcagacgctcgcttatggctgcagcagctagaagaaaaaggccgatacgcaaaagacgtgtgggctggg

SEQ ID NO: 626 - protein, 1049 aa, synthetic construct
  REGION 1..1049: note = Variant of cytochrome P450
MTIKEMPQPKTFGELKNLPLLNTDKPVQALMRIADELGEIFKFEAPGSVTRFLSSQRLIKEACDESRFDKNLSQGLKFARDFLGDGLFTSWTHEPNWKKAHNILGPSFSQRAMKRYHAMMVDIAVQLVQKWERLNADEHIEVSEDMTRLTLDTIGLCGFNYRFNSFYRDQPHPFIVSVERALDEVMNKLQRANPDDPAYDENKRQCQEDIKVMNDYVDKIIADRKARGEQSHDLLTQMLNGKDPETGEPLDDGNIRYQIITFLIAGHETTSGLLSFALYFLVKNPHVLQKVAEEAARVLVDPVPSYKQVKQLKYVGMVLNEALRLWPTAPAFSLYAKEDTVLGGEYPLTKGDEVMVLIPQLHRDKTIWGDDVEEFRPERFENPSAIPQHAFKPFGNGQRACIGQQFALHEANLVLGMMLKHFDFEDHTNYELVIKEKLTLKPEGFVVKAKSKGIPLGGIPSPSTEQSAKKVRKKAENAHNTPLLVLYGSNAGTAEGTARDLADIAMSKGFAPQVATLDSHAGNLPREGAVLIVTASYNGHPPDNAKQFVDWLDQASADEVKGVRYSVFGCGDKNWAATYQKVPAFIDETLAAKGAENIADRGEADASDDFEGTYEEWSDHMWSDVAAYFNLDIENSEDNKSTLSLQFVDSAADMPLAKMHGAFSTNVVASKELQQPGSARSTRHLEIELPKEASYQEGDHLGVIPRNYEGIVNRVTARFGLSASQQIRLEAEEEKLAHLPLAKTVSVEELLQYVELQDPVTRTQLRAMAAKTVCPPHKVELEALLEKQAYKEQVLAKRLTMLELLEKYPACEMKFSEFIALLPSIRPRYYSISSSPRVDEKQASITVSVVSGPAWSGYGEYKGIASNYLAELQEGDTITCFISTDQSEFTLPKDPETPLIMVGPGTGVAPFRGFVQARKQLKEQGQSLGEAHLYFGCRSPHEDYLYQEELENAQSEGIITLHTAFSRMPNQPKTYVQHVMEQDGKKLIELLDQGAHFYICGDGSQMAPAVEATLMKSYADVHQVSEADARLWLQQLEEKGRYAKDVWAG

SEQ ID NO: 627 - DNA, 3147 bp, synthetic construct
  misc_feature 1..3147: note = Variant of cytochrome P450
  source 1..3147: mol_type = other DNA
atgacaattaaggaaatgcctcagcctaagacgtttggagaacttaaaaatttaccgttattaaacacagataaaccggttcaagctttgatgcgtattgcggatgaattaggagaaatctttaaattcgaggcgcctggtagcgtaacgcgctttttatcaagtcagcgtctaattaaagaagcatgcgatgaatcacgctttgataaaaacttaagtcaaggccttaaatttgcacgtgattttcttggagacgggttatttacaagctggacgcatgaaccgaattggaaaaaagcgcataatatcttaggcccaagctttagtcagcgtgcaatgaaacgttatcatgcgatgatggtcgatatcgccgtgcagcttgttcaaaagtgggagcgtctaaatgcagatgagcatattgaagtatcggaagacatgacacgtttaacgctggatacaattggtctttgcggcttcaactatcgctttaacagcttttaccgagatcagcctcatccatttattgtgagtgttgagcgtgcactggatgaagtaatgaacaagctgcagcgagcaaatccagacgacccagcttatgatgaaaacaagcgccagtgtcaagaagatatcaaggtgatgaacgactatgtcgataaaattattgcagatcgcaaagcaaggggtgaacaaagccatgatttattaacgcagatgctaaacggaaaagatccagaaacgggtgagccgcttgatgacgggaacattcgttatcaaattattacattcttaattgcgggacacgaaacaacaagtggtcttttatcatttgcgctgtatttcttagtgaaaaatccacatgtattacaaaaagtagcagaagaagcagcacgagttctagtagatcctgttccaagctacaaacaagtcaaacagcttaaatatgtcggcatggtcttaaacgaagcgctgcgcttatggccaactgctcctgcgttttccctatatgcaaaagaagatacggtgcttggaggagaatatcctttaaccaaaggcgacgaagtaatggttctgattcctcagcttcaccgtgataaaacaatttggggagacgatgtggaggagttccgtccagagcgttttgaaaatccaagtgcgattccgcagcatgcgtttaaaccgtttggaaacggtcagcgtgcgtgtatcggtcagcagttcgctcagcatgaagcaacgctggtacttggtatgatgctaaaacactttgactttgaagatcatacaaactacgagctcgttattaaagaaaagttaacgttaaaacctgaaggctttgtggtaaaagcaaaatcgaaaggcattccgcttggcggtattccttcacctagcactgaacagtctgctaaaaaagtacgcaaaaaggcagaaaacgctcataatacgccgctgcttgtgctatacggttcaaatgcgggaacagctgaaggaacggcgcgtgatttagcagatattgcaatgagcaaaggatttgcaccgcaggtcgcaacgcttgattcacacgccggaaatcttccgcgcgaaggagctgtattaattgtaacggcgtcttataacggtcatccgcctgataacgcaaagcaatttgtcgactggttagaccaagcgtctgctgatgaagtaaaaggcgttcgctactccgtatttggatgcggcgataaaaactgggctgcgacgtatcaaaaagtgcctgcttttatcgatgaaacgcttgccgctaaaggggcagaaaacatcgctgaccgcggtgaagcagatgcaagcgacgactttgaaggcacatatgaagaatggagtgatcatatgtggagtgacgtagcagcctactttaacctcgacattgaaaacagtgaagataataaatctactctttcacttcaatttgtcgacagcgccgcggatatgccgcttgcgaaaatgcacggtgcgttttcaacgaacgtcgtagcaagcaaagaacttcaacagccaggcagtgcacgaagcacgcgacatcttgaaattgaacttccaaaagaagcttcttatcaagaaggagatcatttaggtgttattcctcgcaactatgaaggaatagtaaaccgtgtaacagcaaggttcggcctaagcgcatcacagcaaatccgtctggaagcagaagaagaaaaattagctcatttgccactcgctaaaacagtatccgtagaagagcttctgcaatacgtggagcttcaagatcctgttacgcgcacgcagcttcgcgcaatggctgctaaaacggtctgcccgccgcataaagtagagcttgaagccttgcttgaaaagcaagcctacaaagaacaagtgctggcaaaacgtttaacaatgcttgaactgcttgaaaaatacccggcgtgtgaaatgaaattcagcgaatttatcgcccttctgccaagcatacgcccgcgctattactcgatttcttcatcacctcgtgtcgatgaaaaacaagcaagcatcacggtcagcgttgtctcaggaccggcgtggagcggatatggagaatataaaggaattgcgtcgaactatcttgccgagctgcaagaaggagatacgattacgtgctttatttccacagatcagtcagaatttacgctgccaaaagaccctgaaacgccgcttatcatggtcggaccgggaacaggcgtcgcgccgtttagaggctttgtgcaggcgcgcaaacagctaaaagaacaaggacagtcacttggagaagcacatttatacttcggctgccgttcacctcatgaagactatctgtatcaagaagagcttgaaaacgcccaaagcgaaggcatcattacgcttcataccgctttttctcgcatgccaaatcagccgaaaacatacgttcagcacgtaatggaacaagacggcaagaaattgattgaacttcttgatcaaggagcgcacttctatatttgcggagacggaagccaaatggcacctgccgttgaagcaacgcttatgaaaagctatgctgacgttcaccaagtgagtgaagcagacgctcgcttatggctgcagcagctagaagaaaaaggccgatacgcaaaagacgtgtgggctggg

SEQ ID NO: 628 - protein, 1049 aa, synthetic construct
  REGION 1..1049: note = Variant of cytochrome P450
MTIKEMPQPKTFGELKNLPLLNTDKPVQALMRIADELGEIFKFEAPGSVTRFLSSQRLIKEACDESRFDKNLSQGLKFARDFLGDGLFTSWTHEPNWKKAHNILGPSFSQRAMKRYHAMMVDIAVQLVQKWERLNADEHIEVSEDMTRLTLDTIGLCGFNYRFNSFYRDQPHPFIVSVERALDEVMNKLQRANPDDPAYDENKRQCQEDIKVMNDYVDKIIADRKARGEQSHDLLTQMLNGKDPETGEPLDDGNIRYQIITFLIAGHETTSGLLSFALYFLVKNPHVLQKVAEEAARVLVDPVPSYKQVKQLKYVGMVLNEALRLWPTAPAFSLYAKEDTVLGGEYPLTKGDEVMVLIPQLHRDKTIWGDDVEEFRPERFENPSAIPQHAFKPFGNGQRACIGQQFAQHEATLVLGMMLKHFDFEDHTNYELVIKEKLTLKPEGFVVKAKSKGIPLGGIPSPSTEQSAKKVRKKAENAHNTPLLVLYGSNAGTAEGTARDLADIAMSKGFAPQVATLDSHAGNLPREGAVLIVTASYNGHPPDNAKQFVDWLDQASADEVKGVRYSVFGCGDKNWAATYQKVPAFIDETLAAKGAENIADRGEADASDDFEGTYEEWSDHMWSDVAAYFNLDIENSEDNKSTLSLQFVDSAADMPLAKMHGAFSTNVVASKELQQPGSARSTRHLEIELPKEASYQEGDHLGVIPRNYEGIVNRVTARFGLSASQQIRLEAEEEKLAHLPLAKTVSVEELLQYVELQDPVTRTQLRAMAAKTVCPPHKVELEALLEKQAYKEQVLAKRLTMLELLEKYPACEMKFSEFIALLPSIRPRYYSISSSPRVDEKQASITVSVVSGPAWSGYGEYKGIASNYLAELQEGDTITCFISTDQSEFTLPKDPETPLIMVGPGTGVAPFRGFVQARKQLKEQGQSLGEAHLYFGCRSPHEDYLYQEELENAQSEGIITLHTAFSRMPNQPKTYVQHVMEQDGKKLIELLDQGAHFYICGDGSQMAPAVEATLMKSYADVHQVSEADARLWLQQLEEKGRYAKDVWAG

SEQ ID NO: 629 - DNA, 3147 bp, synthetic construct
  misc_feature 1..3147: note = Variant of cytochrome P450
  source 1..3147: mol_type = other DNA
atgacaattaaggaaatgcctcagcctaagacgtttggagaacttaaaaatttaccgttattaaacacagataaaccggttcaagctttgatgcgtattgcggatgaattaggagaaatctttaaattcgaggcgcctggtagcgtaacgcgctttttatcaagtcagcgtctaattaaagaagcatgcgatgaatcacgctttgataaaaacttaagtcaaggccttaaatttgcacgtgattttcttggagacgggttatttacaagctggacgcatgaaccgaattggaaaaaagcgcataatatcttaggcccaagctttagtcagcgtgcaatgaaacgttatcatgcgatgatggtcgatatcgccgtgcagcttgttcaaaagtgggagcgtctaaatgcagatgagcatattgaagtatcggaagacatgacacgtttaacgctggatacaattggtctttgcggcttcaactatcgctttaacagcttttaccgagatcagcctcatccatttattgtgagtgttgagcgtgcactggatgaagtaatgaacaagctgcagcgagcaaatccagacgacccagcttatgatgaaaacaagcgccagtgtcaagaagatatcaaggtgatgaacgactatgtcgataaaattattgcagatcgcaaagcaaggggtgaacaaagccatgatttattaacgcagatgctaaacggaaaagatccagaaacgggtgagccgcttgatgacgggaacattcgttatcaaattattacattcttaattgcgggacacgaaacaacaagtggtcttttatcatttgcgctgtatttcttagtgaaaaatccacatgtattacaaaaagtagcagaagaagcagcacgagttctagtagatcctgttccaagctacaaacaagtcaaacagcttaaatatgtcggcatggtcttaaacgaagcgctgcgcttatggccaactgctcctgcgttttccctatatgcaaaagaagatacggtgcttggaggagaatatcctttaaccaaaggcgacgaagtaatggttctgattcctcagcttcaccgtgataaaacaatttggggagacgatgtggaggagttccgtccagagcgttttgaaaatccaagtgcgattccgcagcatgcgtttaaaccgtttggaaacggtcagcgtgcgtgtatcggtcagcagttcgctcttcatgaagcaacgctggtacttggtatgatgctaaaacactttgactttgaagatcatacaaactacgagctcgttattaaagaaaagttaacgttaaaacctgaaggctttgtggtaaaagcaaaatcgaaaggcattccgcttggcggtattccttcacctagcactgaacagtctgctaaaaaagtacgcaaaaaggcagaaaacgctcataatacgccgctgcttgtgctatacggttcaaatgcgggaacagctgaaggaacggcgcgtgatttagcagatattgcaatgagcaaaggatttgcaccgcaggtcgcaacgcttgattcacacgccggaaatcttccgcgcgaaggagttgtattaattgtaacggcgtcttataacggtcatccgcctgataacgcaaagcaatttgtcgactggttagaccaagcgtctgctgatgaagtaaaaggcgttcgctactccgtatttggatgcggcgataaaaactgggctgcgacgtatcaaaaagtgcctgcttttatcgatgaaacgcttgccgctaaaggggcagaaaacatcgctgaccgcggtgaagcagatgcaagcgacgactttgaaggcacatatgaagaatggagtgatcatatgtggagtgacgtagcagcctactttaacctcgacattgaaaacagtgaagataataaatctactctttcacttcaatttgtcgacagcgccgcggatatgccgcttgcgaaaatgcacggtgcgttttcaacgaacgtcgtagcaagcaaagaacttcaacagccaggcagtgcacgaagcacgcgacatcttgaaattgaacttccaaaagaagcttcttatcaagaaggagatcatttaggtgttattcctcgcaactatgaaggaatagtaaaccgtgtaacagcaaggttcggcctaagcgcatcacagcaaatccgtctggaagcagaagaagaaaaattagctcatttgccactcgctaaaacagtatccgtagaagagcttctgcaatacgtggagcttcaagatcctgttacgcgcacgcagcttcgcgcaatggctgctaaaacggtctgcccgccgcataaagtagagcttgaagccttgcttgaaaagcaagcctacaaagaacaagtgctggcaaaacgtttaacaatgcttgaactgcttgaaaaatacccggcgtgtgaaatgaaattcagcgaatttatcgcccttctgccaagcatacgcccgcgctattactcgatttcttcatcacctcgtgtcgatgaaaaacaagcaagcatcacggtcagcgttgtctcaggaccggcgtggagcggatatggagaatataaaggaattgcgtcgaactatcttgccgagctgcaagaaggagatacgattacgtgctttatttccacagatcagtcagaatttacgctgccaaaagaccctgaaacgccgcttatcatggtcggaccgggaacaggcgtcgcgccgtttagaggctttgtgcaggcgcgcaaacagctaaaagaacaaggacagtcacttggagaagcacatttatacttcggctgccgttcacctcatgaagactatctgtatcaagaagagcttgaaaacgcccaaagcgaaggcatcattacgcttcataccgctttttctcgcatgccaaatcagccgaaaacatacgttcagcacgtaatggaacaagacggcaagaaattgattgaacttcttgatcaaggagcgcacttctatatttgcggagacggaagccaaatggcacctgccgttgaagcaacgcttatgaaaagctatgctgacgttcaccaagtgagtgaagcagacgctcgcttatggctgcagcagctagaagaaaaaggccgatacgcaaaagacgtgtgggctggg

SEQ ID NO: 630 - protein, 1049 aa, synthetic construct
  REGION 1..1049: note = Variant of cytochrome P450
MTIKEMPQPKTFGELKNLPLLNTDKPVQALMRIADELGEIFKFEAPGSVTRFLSSQRLIKEACDESRFDKNLSQGLKFARDFLGDGLFTSWTHEPNWKKAHNILGPSFSQRAMKRYHAMMVDIAVQLVQKWERLNADEHIEVSEDMTRLTLDTIGLCGFNYRFNSFYRDQPHPFIVSVERALDEVMNKLQRANPDDPAYDENKRQCQEDIKVMNDYVDKIIADRKARGEQSHDLLTQMLNGKDPETGEPLDDGNIRYQIITFLIAGHETTSGLLSFALYFLVKNPHVLQKVAEEAARVLVDPVPSYKQVKQLKYVGMVLNEALRLWPTAPAFSLYAKEDTVLGGEYPLTKGDEVMVLIPQLHRDKTIWGDDVEEFRPERFENPSAIPQHAFKPFGNGQRACIGQQFALHEATLVLGMMLKHFDFEDHTNYELVIKEKLTLKPEGFVVKAKSKGIPLGGIPSPSTEQSAKKVRKKAENAHNTPLLVLYGSNAGTAEGTARDLADIAMSKGFAPQVATLDSHAGNLPREGVVLIVTASYNGHPPDNAKQFVDWLDQASADEVKGVRYSVFGCGDKNWAATYQKVPAFIDETLAAKGAENIADRGEADASDDFEGTYEEWSDHMWSDVAAYFNLDIENSEDNKSTLSLQFVDSAADMPLAKMHGAFSTNVVASKELQQPGSARSTRHLEIELPKEASYQEGDHLGVIPRNYEGIVNRVTARFGLSASQQIRLEAEEEKLAHLPLAKTVSVEELLQYVELQDPVTRTQLRAMAAKTVCPPHKVELEALLEKQAYKEQVLAKRLTMLELLEKYPACEMKFSEFIALLPSIRPRYYSISSSPRVDEKQASITVSVVSGPAWSGYGEYKGIASNYLAELQEGDTITCFISTDQSEFTLPKDPETPLIMVGPGTGVAPFRGFVQARKQLKEQGQSLGEAHLYFGCRSPHEDYLYQEELENAQSEGIITLHTAFSRMPNQPKTYVQHVMEQDGKKLIELLDQGAHFYICGDGSQMAPAVEATLMKSYADVHQVSEADARLWLQQLEEKGRYAKDVWAG

SEQ ID NO: 631 - DNA, 3147 bp, synthetic construct
  misc_feature 1..3147: note = Variant of cytochrome P450
  source 1..3147: mol_type = other DNA
atgacaattaaggaaatgcctcagcctaagacgtttggagaacttaaaaatttaccgttattaaacacagataaaccggttcaagctttgatgcgtattgcggatgaattaggagaaatctttaaattcgaggcgcctggtagcgtaacgcgctttttatcaagtcagcgtctaattaaagaagcatgcgatgaaagtcgctttgataaaaacttaagtcaaggccttaaatttgcacgtgattttcttggagacgggttatttacaagctggacgcatgaaccgaattataaaaaagcgcataatatcttaggcccaagctttagtcagcgtgcaatgaaacgttatcatgcgatgatggtcgatatcgccgtgcagcttgttcaaaagtgggagcgtctaaatgcagatgagcatattgaagtatcggaagacatgacacgtttaacgctggatacaattggtctttgcggcttcaactatcgctttaacagcttttaccgagatcagcctcatccatttattgtgagtgttgagcgtgcactggatgaagtaatgaacaagctgcagcgagcaaatccagacgacccagcttatgatgaaaacaagcgccagtgtcaagaagacatcaaggtgatgaacgactatgtcgataaaattattgcagatcgcaaagcaaggggtgaacaaagccatgatttattaacgcagatgctaaacggaaaagatccagaaacgggtgagccgcttgatgacgggaacattcgttatcaaattattacattcttaattgcgggacacgaaacaacaagtggtcttttatcatttgcgctgtatttcttagtgaaaaatccacatgtattacaaaaagtagcagaagaagcagcacgagttctagtagatcctgttccaagctacaaacaagtcaaacagcttaaatatgtcggcatggtcttaaacgaagcgctgcgcttatggccaactgctcctgcgttttccctatatgcaaaagaagatacggtgcttggaggagaatatcctttaaccaaaggcgacgaagtaatggttctgattcctcagcttcaccgtgataaaacaatttggggagacgatgtggaggagttccgtccagagcgttttgaaaatccaagtgcgattccgcagcatgcgtttaaaccgtttggaaacggtcagcgtgcgtgtatcggtctgcagttcgctcttcatgaagcaacgctggtacttggtatgatgctaaaacactttgactttgaagatcatacaaactacgagctcgttattaaagaaaatttaacgttaaaacctgaaggctttgtggtaaaagcaaaatcgaaaggcattccgcttggcctgattccttcacctagcactgaacagtctgctaaaaaagtacgcaaaaaggcagaaaacgctcataatacgccgctgcttgtgctatacggttcaaatgcgggaacagctgaaggaacggcgcgtgatttagcagatattgcaatgagcaaaggatttgcaccgcaggtcgcaacgcttgattcacacgccggaaatcttccgcgcgaaggagctgtattaattgtaacggcgtcttataacggtcatccgcctgataacgcaaagcaatttgtcgactggttagaccaagcgtctgctgatgaagtaaaaggcgttcgctactccgtatttggatgcggcgataaaaactgggctgcgacgtatcaaaaagtgcctgcttttatcgatgaaacgcttgccgctaaaggggcagaaaacatcgctgaccgcggtgaagcagatgcaagcgacgactttgaaggcgcgtatgaagaatggagtgatcatatgtggagtgacgtagcagcctactttaacctcgacattgaaaacagtgaagataataaatctactctttcacttcaatttgtcgacagcgccgcggatatgccgcttgcgaaaatgcacggtgcgttttcaacgaacgtcgtagcaagcaaagaacttcaacagccaggcagtgcacgaagcacgcgacatcttgaaattgaacttccaaaagaagcttcttatcaagaaggagatcatttaggtgttattcctcgcaactatgaaggaatagtaaaccgtgtaacagcaaggttcggcctaagcgcatcacagcaaatccgtctggaagcagaagaagaaaaattagctcatttgccactcgctaaaacagtatccgtagaagagcttctgcaatacgtggagcttcaagatcctgttacgcgcacgcagcttcgcgcaatggctgctaaaacggtctgcccgccgcataaagtagagcttgaagccttgcttgaaaagcaagcctacaaagaacaagtgctggcaaaacgtttaacaatgcttgaactgcttgaaaaatacccggcgtgtgaaatgaaattcagcgaatttatcgcccttctgccaagcatacgcccgcgctattactcgatttcttcatcacctcgtgtcgatgaaaaacaagcaagcatcacggtcagcgttgtctcaggaccggcgtggagcggatatggagaatataaaggaattgcgtcgaactatcttgccgagctgcaagaaggagatacgattacgtgctttatttccacagatcagtcagaatttacgctgccaaaagaccctgaaacgccgcttatcatggtcggaccgggaacaggcgtcgcgccgtttagaggctttgtgcaggcgcgcaaacagctaaaagaacaaggacagtcacttggagaagcacatttatacttcggctgccgttcacctcatgaagactatctgtatcaagaagagcttgaaaacgcccaaagcgaaggcatcattacgcttcataccgctttttctcgcatgccaaatcagccgaaaacatacgttcagcacgtaatggaacaagacggcaagaaattgattgaacttcttgatcaaggagcgcacttctatatttgcggagacggaagccaaatggcacctgccgttgaagcaacgcttatgaaaagctatgctgacgttcaccaagtgagtgaagcagacgctcgcttatggctgcagcagctagaagaaaaaggccgatacgcaaaagacgtgtgggctggg

SEQ ID NO: 632 - protein, 1049 aa, synthetic construct
  REGION 1..1049: note = Variant of cytochrome P450
MTIKEMPQPKTFGELKNLPLLNTDKPVQALMRIADELGEIFKFEAPGSVTRFLSSQRLIKEACDESRFDKNLSQGLKFARDFLGDGLFTSWTHEPNYKKAHNILGPSFSQRAMKRYHAMMVDIAVQLVQKWERLNADEHIEVSEDMTRLTLDTIGLCGFNYRFNSFYRDQPHPFIVSVERALDEVMNKLQRANPDDPAYDENKRQCQEDIKVMNDYVDKIIADRKARGEQSHDLLTQMLNGKDPETGEPLDDGNIRYQIITFLIAGHETTSGLLSFALYFLVKNPHVLQKVAEEAARVLVDPVPSYKQVKQLKYVGMVLNEALRLWPTAPAFSLYAKEDTVLGGEYPLTKGDEVMVLIPQLHRDKTIWGDDVEEFRPERFENPSAIPQHAFKPFGNGQRACIGLQFALHEATLVLGMMLKHFDFEDHTNYELVIKENLTLKPEGFVVKAKSKGIPLGLIPSPSTEQSAKKVRKKAENAHNTPLLVLYGSNAGTAEGTARDLADIAMSKGFAPQVATLDSHAGNLPREGAVLIVTASYNGHPPDNAKQFVDWLDQASADEVKGVRYSVFGCGDKNWAATYQKVPAFIDETLAAKGAENIADRGEADASDDFEGAYEEWSDHMWSDVAAYFNLDIENSEDNKSTLSLQFVDSAADMPLAKMHGAFSTNVVASKELQQPGSARSTRHLEIELPKEASYQEGDHLGVIPRNYEGIVNRVTARFGLSASQQIRLEAEEEKLAHLPLAKTVSVEELLQYVELQDPVTRTQLRAMAAKTVCPPHKVELEALLEKQAYKEQVLAKRLTMLELLEKYPACEMKFSEFIALLPSIRPRYYSISSSPRVDEKQASITVSVVSGPAWSGYGEYKGIASNYLAELQEGDTITCFISTDQSEFTLPKDPETPLIMVGPGTGVAPFRGFVQARKQLKEQGQSLGEAHLYFGCRSPHEDYLYQEELENAQSEGIITLHTAFSRMPNQPKTYVQHVMEQDGKKLIELLDQGAHFYICGDGSQMAPAVEATLMKSYADVHQVSEADARLWLQQLEEKGRYAKDVWAG

SEQ ID NO: 633 - DNA, 3147 bp, synthetic construct
  misc_feature 1..3147: note = Variant of cytochrome P450
  source 1..3147: mol_type = other DNA
atgacaattaaggaaatgcctcagcctaagacgtttggagaacttaaaaatttaccgttattaaacacagataaaccggttcaagctttgatgcgtattgcggatgaattaggagaaatctttaaattcgaggcgcctggtagcgtaacgcgctttttatcaagtcagcgtctaattaaagaagcatgcgatgaatcacgctttgataaaaacttaagtcaaggccttaaatttgcacgtgattttcttggagacgggttatttacaagctggacgcatgaaccgaattggaaaaaagcgcataatatcttaggcccaagctttagtcagcgtgcaatgaaacgttatcatgcgatgatggtcgatatcgccgtgcagcttgttcaaaagtgggagcgtctaaatgcagatgagcatattgaagtatcggaagacatgacacgtttaacgctggatacaattggtctttgcggcttcaactatcgctttaacagcttttaccgagatcagcctcatccatttattgtgagtgttgagcgtgcactggatgaagtaatgaacaagctgcagcgagcaaatccagacgacccagcttatgatgaaaacaagcgccagtgtcaagaagatatcaaggtgatgaacgactatgtcgataaaattattgcagatcgcaaagcaaggctggaacaaagccatgatttattaacgcagatgctaaacggaaaagatccagaaacgggtgagccgcttgatgacgggaacattcgttatcaaattattacattcttaattgcgggacacgaaacaacaagtggtcttttatcatttgcgctgtatttcttagtgaaaaatccacatgtattacaaaaagtagcagaagaagcagcacgagttctagtagatcctgttccaagctacaaacaagtcaaacagcttaaatatgtcggcatggtcttaaacgaagcgctgcgcttatggccaactgctcctgcgttttccctatatgcaaaagaagatacggtgcttggaggagaatatcctttaaccaaaggcgacgaagtaatggttctgattcctcagcttcaccgtgataaaacaatttggggagacgatgtggaggagttccgtccagagcgttttgaaaatccaagtgcgattccgcagcatgcgtttaaaccgtttggaaacggtcagcgtgcgtgtatcggtcagcagttcgctcttcatgaagcaacgctggtacttggtatgatgctaaaacactttgactttgaagatcatacaaactacgagctcgttattaaagaaaagttaacgttaaaacctgaaggctttgtggtaaaagcaaaatcgaaaggcattccgcttggcggtattccttcacctagcactgaacagtctgctaaaaaagtacgcaaaaaggcagaaaacgctcataatacgccgctgcttgtgctatacggttcaaatgcgggaacagctgaaggaacggcgcgtgatttagcagatattgcaatgagcaaaggatttgcaccgcaggtcgcaacgcttgattcacacgccggaaatcttccgcgcgaaggagctgtattaattgtaacggcgtcttataacggtcatccgcctgataacgcaaagcaatttgtcgactggttagaccaagcgtctgctgatgaagtaaaaggcgttcgctactccgtatttggatgcggcgataaaaactgggctgcgacgtatcaaaaagtgcctgcttttatcgatgaaacgcttgccgctaaaggggcagaaaacatcgctgaccgcggtgaagcagatgcaagcgacgactttgaaggcacatatgaagaatggagtgatcatatgtggagtgacgtagcagcctactttaacctcgacattgaaaacagtgaagataataaatctactctttcacttcaatttgtcgacagcgccgcggatatgccgcttgcgaaaatgcacggtgcgttttcaacgaacgtcgtagcaagcaaagaacttcaacagccaggcagtgcacgaagcacgcgacatcttgaaattgaacttccaaaagaagcttcttatcaagaaggagatcatttaggtgttattcctcgcaactatgaaggaatagtaaaccgtgtaacagcaaggttcggcctaagcgcatcacagcaaatccgtctggaagcagaagaagaaaaattagctcatttgccactcgctaaaacagtatccgtagaagagcttctgcaatacgtggagcttcaagatcctgttacgcgcacgcagcttcgcgcaatggctgctaaaacggtctgcccgccgcataaagtagagcttgaagccttgcttgaaaagcaagcctacaaagaacaagtgctggcaaaacgtttaacaatgcttgaactgcttgaaaaatacccggcgtgtgaaatgaaattcagcgaatttatcgcccttctgccaagcatacgcccgcgctattactcgatttcttcatcacctcgtgtcgatgaaaaacaagcaagcatcacggtcagcgttgtctcaggaccggcgtggagcggatatggagaatataaaggaattgcgtcgaactatcttgccgagctgcaagaaggagatacgattacgtgctttatttccacagatcagtcagaatttacgctgccaaaagaccctgaaacgccgcttatcatggtcggaccgggaacaggcgtcgcgccgtttagaggctttgtgcaggcgcgcaaacagctaaaagaacaaggacagtcacttggagaagcacatttatacttcggctgccgttcacctcatgaagactatctgtatcaagaagagcttgaaaacgcccaaagcgaaggcatcattacgcttcataccgctttttctcgcatgccaaatcagccgaaaacatacgttcagcacgtaatggaacaagacggcaagaaattgattgaacttcttgatcaaggagcgcacttctatatttgcggagacggaagccaaatggcacctgccgttgaagcaacgcttatgaaaagctatgctgacgttcaccaagtgagtgaagcagacgctcgcttatggctgcagcagctagaagaaaaaggccgatacgcaaaagacgtgtgggctggg

SEQ ID NO: 634 - protein, 1049 aa, synthetic construct
  REGION 1..1049: note = Variant of cytochrome P450
MTIKEMPQPKTFGELKNLPLLNTDKPVQALMRIADELGEIFKFEAPGSVTRFLSSQRLIKEACDESRFDKNLSQGLKFARDFLGDGLFTSWTHEPNWKKAHNILGPSFSQRAMKRYHAMMVDIAVQLVQKWERLNADEHIEVSEDMTRLTLDTIGLCGFNYRFNSFYRDQPHPFIVSVERALDEVMNKLQRANPDDPAYDENKRQCQEDIKVMNDYVDKIIADRKARLEQSHDLLTQMLNGKDPETGEPLDDGNIRYQIITFLIAGHETTSGLLSFALYFLVKNPHVLQKVAEEAARVLVDPVPSYKQVKQLKYVGMVLNEALRLWPTAPAFSLYAKEDTVLGGEYPLTKGDEVMVLIPQLHRDKTIWGDDVEEFRPERFENPSAIPQHAFKPFGNGQRACIGQQFALHEATLVLGMMLKHFDFEDHTNYELVIKEKLTLKPEGFVVKAKSKGIPLGGIPSPSTEQSAKKVRKKAENAHNTPLLVLYGSNAGTAEGTARDLADIAMSKGFAPQVATLDSHAGNLPREGAVLIVTASYNGHPPDNAKQFVDWLDQASADEVKGVRYSVFGCGDKNWAATYQKVPAFIDETLAAKGAENIADRGEADASDDFEGTYEEWSDHMWSDVAAYFNLDIENSEDNKSTLSLQFVDSAADMPLAKMHGAFSTNVVASKELQQPGSARSTRHLEIELPKEASYQEGDHLGVIPRNYEGIVNRVTARFGLSASQQIRLEAEEEKLAHLPLAKTVSVEELLQYVELQDPVTRTQLRAMAAKTVCPPHKVELEALLEKQAYKEQVLAKRLTMLELLEKYPACEMKFSEFIALLPSIRPRYYSISSSPRVDEKQASITVSVVSGPAWSGYGEYKGIASNYLAELQEGDTITCFISTDQSEFTLPKDPETPLIMVGPGTGVAPFRGFVQARKQLKEQGQSLGEAHLYFGCRSPHEDYLYQEELENAQSEGIITLHTAFSRMPNQPKTYVQHVMEQDGKKLIELLDQGAHFYICGDGSQMAPAVEATLMKSYADVHQVSEADARLWLQQLEEKGRYAKDVWAG

SEQ ID NO: 635 - DNA, 3147 bp, synthetic construct
  misc_feature 1..3147: note = Variant of cytochrome P450
  source 1..3147: mol_type = other DNA
atgacaattaaggaaatgcctcagcctaagacgtttggagaacttaaaaatttaccgttattaaacacagataaaccggttcaagctttgatgcgtattgcggatgaattaggagaaatctttaaattcgaggcgcctggtagcgtaacgcgctttttatcaagtcagcgtctaattaaagaagcatgcgatgaatcagcttttgataaaaacttaagtcaaggccttaaatttgcacgtgattttcttggagacgggttatttacaagctggacgcatgaaccgaattggaaaaaagcgcataatatcttaggcccaagctttagtcagcgtgcaatgaaacgttatcatgcgatgatggtcgatatcgccgtgcagcttgttcaaaagtgggagcgtctaaatgcagatgagcatattgaagtatcggaagacatgacacgtttaacgctggatacaattggtctttgcggcttcaactatcgctttaacagcttttaccgagatcagcctcatccatttattgtgagtgttgagcgtgcactggatgaagtaatgaacaagctgcagcgagcaaatccagacgacccagcttatgatgaaaacaagcgccagtgtcaagaagatatcaaggtgatgaacgactatgtcgataaaattattgcagatcgcaaagcaaggggtgaacaaagccatgatttattaacgcagatgctaaacggaaaagatccagaaacgggtgagccgcttgatgacgggaacattcgttatcaaattattacattcttaattgcgggacacgaaacaacaagtggtcttttatcatttgcgctgtatttcttagtgaaaaatccacatgtattacaaaaagtagcagaagaagcagcacgagttctagtagatcctgttccaagctacaaacaagtcaaacagcttaaatatgtcggcatggtcttaaacgaagcgctgcgcttatggccaactgctcctgcgttttccctatatgcaaaagaagatacggtgcttggaggagaatatcctttaaccaaaggcgacgaagtaatggttctgattcctcagcttcaccgtgataaaacaatttggggagacgatgtggaggagttccgtccagagcgttttgaaaatccaagtgcgattccgcagcatgcgtttaaaccgtttggaaacggtcagcgtgcgtgtatcggtcagcagttcgctcttcatgaagcaacgctggtacttggtatgatgctaaaacactttgactttgaagatcatacaaactacgagctcgttattaaagaaaagttaacgttaaaacctgaaggctttgtggtaaaagcaaaatcgaaaggcattccgcttggcggtattccttcacctagcactgaacagtctgctaaaaaagtacgcaaaaaggcagaaaacgctcataatacgccgctgcttgtgctatacggttcaaatgcgggaacagctgaaggaacggcgcgtgatttagcagatattgcaatgagcaaaggatttgcaccgcaggtcgcaacgcttgattcacacgccggaaatcttccgcgcgaaggagctgtattaattgtaacggcgtcttataacggtcatccgcctgataacgcaaagcaatttgtcgactggttagaccaagcgtctgctgatgaagtaaaaggcgttcgctactccgtatttggatgcggcgataaaaactgggctgcgacgtatcaaaaagtgcctgcttttatcgatgaaacgcttgccgctaaaggggcagaaaacatcgctgaccgcggtgaagcagatgcaagcgacgactttgaaggcacatatgaagaatggagtgatcatatgtggagtgacgtagcagcctactttaacctcgacattgaaaacagtgaagataataaatctactctttcacttcaatttgtcgacagcgccgcggatatgccgcttgcgaaaatgcacggtgcgttttcaacgaacgtcgtagcaagcaaagaacttcaacagccaggcagtgcacgaagcacgcgacatcttgaaattgaacttccaaaagaagcttcttatcaagaaggagatcatttaggtgttattcctcgcaactatgaaggaatagtaaaccgtgtaacagcaaggttcggcctaagcgcatcacagcaaatccgtctggaagcagaagaagaaaaattagctcatttgccactcgctaaaacagtatccgtagaagagcttctgcaatacgtggagcttcaagatcctgttacgcgcacgcagcttcgcgcaatggctgctaaaacggtctgcccgccgcataaagtagagcttgaagccttgcttgaaaagcaagcctacaaagaacaagtgctggcaaaacgtttaacaatgcttgaactgcttgaaaaatacccggcgtgtgaaatgaaattcagcgaatttatcgcccttctgccaagcatacgcccgcgctattactcgatttcttcatcacctcgtgtcgatgaaaaacaagcaagcatcacggtcagcgttgtctcaggaccggcgtggagcggatatggagaatataaaggaattgcgtcgaactatcttgccgagctgcaagaaggagatacgattacgtgctttatttccacagatcagtcagaatttacgctgccaaaagaccctgaaacgccgcttatcatggtcggaccgggaacaggcgtcgcgccgtttagaggctttgtgcaggcgcgcaaacagctaaaagaacaaggacagtcacttggagaagcacatttatacttcggctgccgttcacctcatgaagactatctgtatcaagaagagcttgaaaacgcccaaagcgaaggcatcattacgcttcataccgctttttctcgcatgccaaatcagccgaaaacatacgttcagcacgtaatggaacaagacggcaagaaattgattgaacttcttgatcaaggagcgcacttctatatttgcggagacggaagccaaatggcacctgccgttgaagcaacgcttatgaaaagctatgctgacgttcaccaagtgagtgaagcagacgctcgcttatggctgcagcagctagaagaaaaaggccgatacgcaaaagacgtgtgggctggg

SEQ ID NO: 636 - protein, 1049 aa, synthetic construct
  REGION 1..1049: note = Variant of cytochrome P450
MTIKEMPQPKTFGELKNLPLLNTDKPVQALMRIADELGEIFKFEAPGSVTRFLSSQRLIKEACDESAFDKNLSQGLKFARDFLGDGLFTSWTHEPNWKKAHNILGPSFSQRAMKRYHAMMVDIAVQLVQKWERLNADEHIEVSEDMTRLTLDTIGLCGFNYRFNSFYRDQPHPFIVSVERALDEVMNKLQRANPDDPAYDENKRQCQEDIKVMNDYVDKIIADRKARGEQSHDLLTQMLNGKDPETGEPLDDGNIRYQIITFLIAGHETTSGLLSFALYFLVKNPHVLQKVAEEAARVLVDPVPSYKQVKQLKYVGMVLNEALRLWPTAPAFSLYAKEDTVLGGEYPLTKGDEVMVLIPQLHRDKTIWGDDVEEFRPERFENPSAIPQHAFKPFGNGQRACIGQQFALHEATLVLGMMLKHFDFEDHTNYELVIKEKLTLKPEGFVVKAKSKGIPLGGIPSPSTEQSAKKVRKKAENAHNTPLLVLYGSNAGTAEGTARDLADIAMSKGFAPQVATLDSHAGNLPREGAVLIVTASYNGHPPDNAKQFVDWLDQASADEVKGVRYSVFGCGDKNWAATYQKVPAFIDETLAAKGAENIADRGEADASDDFEGTYEEWSDHMWSDVAAYFNLDIENSEDNKSTLSLQFVDSAADMPLAKMHGAFSTNVVASKELQQPGSARSTRHLEIELPKEASYQEGDHLGVIPRNYEGIVNRVTARFGLSASQQIRLEAEEEKLAHLPLAKTVSVEELLQYVELQDPVTRTQLRAMAAKTVCPPHKVELEALLEKQAYKEQVLAKRLTMLELLEKYPACEMKFSEFIALLPSIRPRYYSISSSPRVDEKQASITVSVVSGPAWSGYGEYKGIASNYLAELQEGDTITCFISTDQSEFTLPKDPETPLIMVGPGTGVAPFRGFVQARKQLKEQGQSLGEAHLYFGCRSPHEDYLYQEELENAQSEGIITLHTAFSRMPNQPKTYVQHVMEQDGKKLIELLDQGAHFYICGDGSQMAPAVEATLMKSYADVHQVSEADARLWLQQLEEKGRYAKDVWAG

SEQ ID NO: 637 - DNA, 3147 bp, synthetic construct
  misc_feature 1..3147: note = Variant of cytochrome P450
  source 1..3147: mol_type = other DNA
atgacaattaaggaaatgcctcagcctaagacgtttggagaacttaaaaatttaccgttattaaacacagataaaccggttcaagctttgatgcgtattgcggatgaattaggagaaatctttaaattcgaggcgcctggtagcgtaacgcgctttttatcaagtcagcgtctaattaaagaagcatgcgatgaatcacgctttgataaaaacttaagtcaaggccttaaatttgcacgtgattttcttggagacgggttatttacaagctggacgcatgaaccgaattggaaaaaagcgcataatatcttaggcccaagctttagtcagcgtgcaatgaaacgttatcatgcgatgatggtcgatatcgccgtgcagcttgttcaaaagtgggagcgtctaaatgcagatgagcatattgaagtatcggaagacatgacacgtttaacgctggatacaattggtctttgcggcttcaactatcgctttaacagcttttaccgagatcagcctcatccatttattgtgagtgttgagcgtgcactggatgaagtaatgaacaagctgcagcgagcaaatccagacgacccagcttatgatgaaaacaagcgccagtgtcaagaagatatcaaggtgatgaacgactatgtcgataaaattattgcagatcgcaaagcaaggggtgaacaaagccatgatttattaacgcagatgctaaacggaaaagatccagaaacgggtgagccgcttgatgacgggaacattcgttatcaaattattacattcttaattgcgggacacgaaacaacaagtggtcttttatcatttgcgctgtatttcttagtgaaaaatccacatgtattacaaaaagtagcagaagaagcagcacgagttctagtagatcctgttccaagctacaaacaagtcaaacagcttaaatatgtcggcatggtcttaaacgaagcgctgcgcttatggccaactgctcctgcgttttccctatatgcaaaagaagatacggtgcttggaggagaatatcctttaaccaaaggcgacgaagtaatggttctgattcctcagcttcaccgtgataaaacaatttggggagacgatgtggaggagttccgtccagagcgttttgaaaatccaagtgcgattccgcagcatgcgtttaaaccgtttggaaacggtcagcgtgcgtgtatcggtcagcagttcgctcttcatgaagcaacgctggtacttggtatgatgctaaaacactttgactttgaagatcatacaaactacgagctcgttattaaagaaaagttaacgttaaaacctgaaggctttgtggtaaaagcaaaatcgaaaggcattccgcttggcggtattccttcacctagcactgaacagtctgctaaaaaagtacgcaaaaaggcagaaaacgctcataatacgccgctgcttgtgctatacggttcaaatgcgggaacagctgaaggaacggcgcgtgatttaggtgatattgcaatgagcaaaggatttgcaccgcaggtcgcaacgcttgattcacacgccggaaatcttccgcgcgaaggagctgtattaattgtaacggcgtcttataacggtcatccgcctgataacgcaaagcaatttgtcgactggttagaccaagcgtctgctgatgaagtaaaaggcgttcgctactccgtatttggatgcggcgataaaaactgggctgcgacgtatcaaaaagtgcctgcttttatcgatgaaacgcttgccgctaaaggggcagaaaacatcgctgaccgcggtgaagcagatgcaagcgacgactttgaaggcacatatgaagaatggagtgatcatatgtggagtgacgtagcagcctactttaacctcgacattgaaaacagtgaagataataaatctactctttcacttcaatttgtcgacagcgccgcggatatgccgcttgcgaaaatgcacggtgcgttttcaacgaacgtcgtagcaagcaaagaacttcaacagccaggcagtgcacgaagcacgcgacatcttgaaattgaacttccaaaagaagcttcttatcaagaaggagatcatttaggtgttattcctcgcaactatgaaggaatagtaaaccgtgtaacagcaaggttcggcctaagcgcatcacagcaaatccgtctggaagcagaagaagaaaaattagctcatttgccactcgctaaaacagtatccgtagaagagcttctgcaatacgtggagcttcaagatcctgttacgcgcacgcagcttcgcgcaatggctgctaaaacggtctgcccgccgcataaagtagagcttgaagccttgcttgaaaagcaagcctacaaagaacaagtgctggcaaaacgtttaacaatgcttgaactgcttgaaaaatacccggcgtgtgaaatgaaattcagcgaatttatcgcccttctgccaagcatacgcccgcgctattactcgatttcttcatcacctcgtgtcgatgaaaaacaagcaagcatcacggtcagcgttgtctcaggaccggcgtggagcggatatggagaatataaaggaattgcgtcgaactatcttgccgagctgcaagaaggagatacgattacgtgctttatttccacagatcagtcagaatttacgctgccaaaagaccctgaaacgccgcttatcatggtcggaccgggaacaggcgtcgcgccgtttagaggctttgtgcaggcgcgcaaacagctaaaagaacaaggacagtcacttggagaagcacatttatacttcggctgccgttcacctcatgaagactatctgtatcaagaagagcttgaaaacgcccaaagcgaaggcatcattacgcttcataccgctttttctcgcatgccaaatcagccgaaaacatacgttcagcacgtaatggaacaagacggcaagaaattgattgaacttcttgatcaaggagcgcacttctatatttgcggagacggaagccaaatggcacctgccgttgaagcaacgcttatgaaaagctatgctgacgttcaccaagtgagtgaagcagacgctcgcttatggctgcagcagctagaagaaaaaggccgatacgcaaaagacgtgtgggctggg

SEQ ID NO: 638 - protein, 1049 aa, synthetic construct
  REGION 1..1049: note = Variant of cytochrome P450
MTIKEMPQPKTFGELKNLPLLNTDKPVQALMRIADELGEIFKFEAPGSVTRFLSSQRLIKEACDESRFDKNLSQGLKFARDFLGDGLFTSWTHEPNWKKAHNILGPSFSQRAMKRYHAMMVDIAVQLVQKWERLNADEHIEVSEDMTRLTLDTIGLCGFNYRFNSFYRDQPHPFIVSVERALDEVMNKLQRANPDDPAYDENKRQCQEDIKVMNDYVDKIIADRKARGEQSHDLLTQMLNGKDPETGEPLDDGNIRYQIITFLIAGHETTSGLLSFALYFLVKNPHVLQKVAEEAARVLVDPVPSYKQVKQLKYVGMVLNEALRLWPTAPAFSLYAKEDTVLGGEYPLTKGDEVMVLIPQLHRDKTIWGDDVEEFRPERFENPSAIPQHAFKPFGNGQRACIGQQFALHEATLVLGMMLKHFDFEDHTNYELVIKEKLTLKPEGFVVKAKSKGIPLGGIPSPSTEQSAKKVRKKAENAHNTPLLVLYGSNAGTAEGTARDLGDIAMSKGFAPQVATLDSHAGNLPREGAVLIVTASYNGHPPDNAKQFVDWLDQASADEVKGVRYSVFGCGDKNWAATYQKVPAFIDETLAAKGAENIADRGEADASDDFEGTYEEWSDHMWSDVAAYFNLDIENSEDNKSTLSLQFVDSAADMPLAKMHGAFSTNVVASKELQQPGSARSTRHLEIELPKEASYQEGDHLGVIPRNYEGIVNRVTARFGLSASQQIRLEAEEEKLAHLPLAKTVSVEELLQYVELQDPVTRTQLRAMAAKTVCPPHKVELEALLEKQAYKEQVLAKRLTMLELLEKYPACEMKFSEFIALLPSIRPRYYSISSSPRVDEKQASITVSVVSGPAWSGYGEYKGIASNYLAELQEGDTITCFISTDQSEFTLPKDPETPLIMVGPGTGVAPFRGFVQARKQLKEQGQSLGEAHLYFGCRSPHEDYLYQEELENAQSEGIITLHTAFSRMPNQPKTYVQHVMEQDGKKLIELLDQGAHFYICGDGSQMAPAVEATLMKSYADVHQVSEADARLWLQQLEEKGRYAKDVWAG

SEQ ID NO: 639 - DNA, 3147 bp, synthetic construct
  misc_feature 1..3147: note = Variant of cytochrome P450
  source 1..3147: mol_type = other DNA
atgacaattaaggaaatgcctcagcctaagacgtttggagaacttaaaaatttaccgttattaaacacagataaaccggttcaagctttgatgcgtattgcggatgaattaggagaaatctttaaattcgaggcgcctggtagcgtaacgcgctttttatcaagtcagcgtctaattaaagaagcatgcgatgaatcacgctttgataaaaacttaagtcaaggccttaaatttgcacgtgattttcttggagacgggttatttacaagctggacgcatgaaccgaattggaaaaaagcgcataatatcttaggcccaagctttagtcagcgtgcaatgaaacgttatcatgcgatgatggtcgatatcgccgtgcagcttgttcaaaagtgggagcgtctaaatgcagatgagcatattgaagtatcggaagacatgacacgtttaacgctggatacaattggtctttgcggcttcaactatcgctttaacagcttttaccgagatcagcctcatccatttattgtgagtgttgagcgtgcactggatgaagtaatgaacaagctgcagcgagcaaatccagacgacccagcttatgatgaaaacaagcgccagtgtcaagaagatatcaaggtgatgaacgactatgtcgataaaattattgcagatcgcaaagcaaggggtgaacaaagccatgatttattaacgcagatgctaaacggaaaagatccagaaacgggtgagccgcttgatgacgggaacattcgttatcaaattattacattcttaattgcgggacacgaaacaacaagtggtcttttatcatttgcgctgtatttcttagtgaaaaatccacatgtattacaaaaagtagcagaagaagcagcacgagttctagtagatcctgttccaagctacaaacaagtcaaacagcttaaatatgtcggcatggtcttaaacgaagcgctgcgcttatggccaactgctcctgcgttttccctatattcgaaagaagatacggtgcttggaggagaatatcctttaaccaaaggcgacgaagtaatggttctgattcctcagcttcaccgtgataaaacaatttggggagacgatgtggaggagttccgtccagagcgttttgaaaatccaagtgcgattccgcagcatgcgtttaaaccgtttggaaacggtcagcgtgcgtgtatcggtcagcagttcgctcttcatgaagcaacgctggtacttggtatgatgctaaaacactttgactttgaagatcatacaaactacgagctcgttattaaagaaaagttaacgttaaaacctgaaggctttgtggtaaaagcaaaatcgaaaggcattccgcttggcggtattccttcacctagcactgaacagtctgctaaaaaagtacgcaaaaaggcagaaaacgctcataatacgccgctgcttgtgctatacggttcaaatgcgggaacagctgaaggaacggcgcgtgatttagcagatattgcaatgagcaaaggatttgcaccgcaggtcgcaacgcttgattcacacgccggaaatcttccgcgcgaaggagctgtattaattgtaacggcgtcttataacggtcatccgcctgataacgcaaagcaatttgtcgactggttagaccaagcgtctgctgatgaagtaaaaggcgttcgctactccgtatttggatgcggcgataaaaactgggctgcgacgtatcaaaaagtgcctgcttttatcgatgaaacgcttgccgctaaaggggcagaaaacatcgctgaccgcggtgaagcagatgcaagcgacgactttgaaggcacatatgaagaatggagtgatcatatgtggagtgacgtagcagcctactttaacctcgacattgaaaacagtgaagataataaatctactctttcacttcaatttgtcgacagcgccgcggatatgccgcttgcgaaaatgcacggtgcgttttcaacgaacgtcgtagcaagcaaagaacttcaacagccaggcagtgcacgaagcacgcgacatcttgaaattgaacttccaaaagaagcttcttatcaagaaggagatcatttaggtgttattcctcgcaactatgaaggaatagtaaaccgtgtaacagcaaggttcggcctaagcgcatcacagcaaatccgtctggaagcagaagaagaaaaattagctcatttgccactcgctaaaacagtatccgtagaagagcttctgcaatacgtggagcttcaagatcctgttacgcgcacgcagcttcgcgcaatggctgctaaaacggtctgcccgccgcataaagtagagcttgaagccttgcttgaaaagcaagcctacaaagaacaagtgctggcaaaacgtttaacaatgcttgaactgcttgaaaaatacccggcgtgtgaaatgaaattcagcgaatttatcgcccttctgccaagcatacgcccgcgctattactcgatttcttcatcacctcgtgtcgatgaaaaacaagcaagcatcacggtcagcgttgtctcaggaccggcgtggagcggatatggagaatataaaggaattgcgtcgaactatcttgccgagctgcaagaaggagatacgattacgtgctttatttccacagatcagtcagaatttacgctgccaaaagaccctgaaacgccgcttatcatggtcggaccgggaacaggcgtcgcgccgtttagaggctttgtgcaggcgcgcaaacagctaaaagaacaaggacagtcacttggagaagcacatttatacttcggctgccgttcacctcatgaagactatctgtatcaagaagagcttgaaaacgcccaaagcgaaggcatcattacgcttcataccgctttttctcgcatgccaaatcagccgaaaacatacgttcagcacgtaatggaacaagacggcaagaaattgattgaacttcttgatcaaggagcgcacttctatatttgcggagacggaagccaaatggcacctgccgttgaagcaacgcttatgaaaagctatgctgacgttcaccaagtgagtgaagcagacgctcgcttatggctgcagcagctagaagaaaaaggccgatacgcaaaagacgtgtgggctggg

SEQ ID NO: 640 - protein, 1049 aa, synthetic construct
  REGION 1..1049: note = Variant of cytochrome P450
MTIKEMPQPKTFGELKNLPLLNTDKPVQALMRIADELGEIFKFEAPGSVTRFLSSQRLIKEACDESRFDKNLSQGLKFARDFLGDGLFTSWTHEPNWKKAHNILGPSFSQRAMKRYHAMMVDIAVQLVQKWERLNADEHIEVSEDMTRLTLDTIGLCGFNYRFNSFYRDQPHPFIVSVERALDEVMNKLQRANPDDPAYDENKRQCQEDIKVMNDYVDKIIADRKARGEQSHDLLTQMLNGKDPETGEPLDDGNIRYQIITFLIAGHETTSGLLSFALYFLVKNPHVLQKVAEEAARVLVDPVPSYKQVKQLKYVGMVLNEALRLWPTAPAFSLYSKEDTVLGGEYPLTKGDEVMVLIPQLHRDKTIWGDDVEEFRPERFENPSAIPQHAFKPFGNGQRACIGQQFALHEATLVLGMMLKHFDFEDHTNYELVIKEKLTLKPEGFVVKAKSKGIPLGGIPSPSTEQSAKKVRKKAENAHNTPLLVLYGSNAGTAEGTARDLADIAMSKGFAPQVATLDSHAGNLPREGAVLIVTASYNGHPPDNAKQFVDWLDQASADEVKGVRYSVFGCGDKNWAATYQKVPAFIDETLAAKGAENIADRGEADASDDFEGTYEEWSDHMWSDVAAYFNLDIENSEDNKSTLSLQFVDSAADMPLAKMHGAFSTNVVASKELQQPGSARSTRHLEIELPKEASYQEGDHLGVIPRNYEGIVNRVTARFGLSASQQIRLEAEEEKLAHLPLAKTVSVEELLQYVELQDPVTRTQLRAMAAKTVCPPHKVELEALLEKQAYKEQVLAKRLTMLELLEKYPACEMKFSEFIALLPSIRPRYYSISSSPRVDEKQASITVSVVSGPAWSGYGEYKGIASNYLAELQEGDTITCFISTDQSEFTLPKDPETPLIMVGPGTGVAPFRGFVQARKQLKEQGQSLGEAHLYFGCRSPHEDYLYQEELENAQSEGIITLHTAFSRMPNQPKTYVQHVMEQDGKKLIELLDQGAHFYICGDGSQMAPAVEATLMKSYADVHQVSEADARLWLQQLEEKGRYAKDVWAG

SEQ ID NO: 641 - DNA, 3147 bp, synthetic construct
  misc_feature 1..3147: note = Variant of cytochrome P450
  source 1..3147: mol_type = other DNA
atgacaattaaggaaatgcctcagcctaagacgtttggagaacttaaaaatttaccgttattaaacacagataaaccggttcaagctttgatgcgtattgcggatgaattaggagaaatctttaaattcgaggcgcctggtagcgtaacgcgctttttatcaagtcagcgtctaattaaagaagcatgcgatgaatcacgctttgataaaaacttaagtcaaggccttaaatttgcacgtgattttcttggagacgggttatttacaagctggacgcatgaaccgaattggaaaaaagcgcataatatcttaggcccaagctttagtcagcgtgcaatgaaacgttatcatgcgatgatggtcgatatcgccgtgcagcttgttcaaaagtgggagcgtctaaatgcagatgagcatattgaagtatcggaagacatgacacgtttaacgctggatacaattggtctttgcggcttcaactatcgctttaacagcttttaccgagatcagcctcatccatttattgtgagtgttgagggtctgctggatgaagtaatgaacaagctgcagcgagcaaatccagacgacccagcttatgatgaaaacaagcgccagtgtcaagaagacatcaaggtgatgaacgactatgtcgataaaattattgcagatcgcaaagcaaggggtgaacaaagccatgatttattaacgcagatgctaaacggaaaagatccagaaacgggtgagccgcttgatgacgggaacattcgttatcaaattattacattcttaattgcgggacacgaaacaacaagtggtcttttatcatttgcgctgtatttcttagtgaaaaatccacatgtattacaaaaagtagcagaagaagcagcacgagttctagtagatcctgttccaagctacaaacaagtcaaacagcttaaatatgtcggcatggtcttaaacgaagcgctgcgcttatggccaactgctcctgcgttttccctatatgcaaaagaagatacggtgcttggaggagaatatcctttaaccaaaggcgacgaagtaatggttctgattcctcagcttcaccgtgataaaacaatttggggagacgatgtggaggagttccgtccagagcgttttgaaaatccaagtgcgattccgcagcatgcgtttaaaccgtttggaaacggtcagcgtgcgtgtatcggttggcagttcgctcttcatgaagcaacgctggtacttggtatgatgctaaaacactttgactttgaagatcatacaaactacgagctcgttattaaagaaatgttaacgttaaaacctgaaggctttgtggtaaaagcaaaatcgaaaggcattccgcttggcctgattccttcacctagcactgaacagtctgctaaaaaagtacgcaaaaaggcagaaaacgctcataatacgccgctgcttgtgctatacggttcaaatgcgggaacagctgaaggaacggcgcgtgatttagcagatattgcaatgagcaaaggatttgcaccgcaggtcgcaacgcttgattcacacgccggaaatcttccgcgcgaaggagctgtattaattgtaacggcgtcttataacggtcatccgcctgataacgcaaagcaatttgtcgactggttagaccaagcgtctgctgatgaagtaaaaggcgttcgctactccgtatttggatgcggcgataaaaactgggctgcgacgtatcaaaaagtgcctgcttttatcgatgaaacgcttgccgctaaaggggcagaaaacatcgctgaccgcggtgaagcagatgcaagcgacgactttgaaggcacatatgaagaatggagtgatcatatgtggagtgacgtagcagcctactttaacctcgacattgaaaacagtgaagataataaatctactctttcacttcaatttgtcgacagcgccgcggatatgccgcttgcgaaaatgcacggtgcgttttcaacgaacgtcgtagcaagcaaagaacttcaacagccaggcagtgcacgaagcacgcgacatcttgaaattgaacttccaaaagaagcttcttatcaagaaggagatcatttaggtgttattcctcgcaactatgaaggaatagtaaaccgtgtaacagcaaggttcggcctaagcgcatcacagcaaatccgtctggaagcagaagaagaaaaattagctcatttgccactcgctaaaacagtatccgtagaagagcttctgcaatacgtggagcttcaagatcctgttacgcgcacgcagcttcgcgcaatggctgctaaaacggtctgcccgccgcataaagtagagcttgaagccttgcttgaaaagcaagcctacaaagaacaagtgctggcaaaacgtttaacaatgcttgaactgcttgaaaaatacccggcgtgtgaaatgaaattcagcgaatttatcgcccttctgccaagcatacgcccgcgctattactcgatttcttcatcacctcgtgtcgatgaaaaacaagcaagcatcacggtcagcgttgtctcaggaccggcgtggagcggatatggagaatataaaggaattgcgtcgaactatcttgccgagctgcaagaaggagatacgattacgtgctttatttccacagatcagtcagaatttacgctgccaaaagaccctgaaacgccgcttatcatggtcggaccgggaacaggcgtcgcgccgtttagaggctttgtgcaggcgcgcaaacagctaaaagaacaaggacagtcacttggagaagcacatttatacttcggctgccgttcacctcatgaagactatctgtatcaagaagagcttgaaaacgcccaaagcgaaggcatcattacgcttcataccgctttttctcgcatgccaaatcagccgaaaacatacgttcagcacgtaatggaacaagacggcaagaaattgattgaacttcttgatcaaggagcgcacttctatatttgcggagacggaagccaaatggcacctgccgttgaagcaacgcttatgaaaagctatgctgacgttcaccaagtgagtgaagcagacgctcgcttatggctgcagcagctagaagaaaaaggccgatacgcaaaagacgtgtgggctggg

SEQ ID NO: 642 - protein, 1049 aa, synthetic construct
  REGION 1..1049: note = Variant of cytochrome P450
MTIKEMPQPKTFGELKNLPLLNTDKPVQALMRIADELGEIFKFEAPGSVTRFLSSQRLIKEACDESRFDKNLSQGLKFARDFLGDGLFTSWTHEPNWKKAHNILGPSFSQRAMKRYHAMMVDIAVQLVQKWERLNADEHIEVSEDMTRLTLDTIGLCGFNYRFNSFYRDQPHPFIVSVEGLLDEVMNKLQRANPDDPAYDENKRQCQEDIKVMNDYVDKIIADRKARGEQSHDLLTQMLNGKDPETGEPLDDGNIRYQIITFLIAGHETTSGLLSFALYFLVKNPHVLQKVAEEAARVLVDPVPSYKQVKQLKYVGMVLNEALRLWPTAPAFSLYAKEDTVLGGEYPLTKGDEVMVLIPQLHRDKTIWGDDVEEFRPERFENPSAIPQHAFKPFGNGQRACIGWQFALHEATLVLGMMLKHFDFEDHTNYELVIKEMLTLKPEGFVVKAKSKGIPLGLIPSPSTEQSAKKVRKKAENAHNTPLLVLYGSNAGTAEGTARDLADIAMSKGFAPQVATLDSHAGNLPREGAVLIVTASYNGHPPDNAKQFVDWLDQASADEVKGVRYSVFGCGDKNWAATYQKVPAFIDETLAAKGAENIADRGEADASDDFEGTYEEWSDHMWSDVAAYFNLDIENSEDNKSTLSLQFVDSAADMPLAKMHGAFSTNVVASKELQQPGSARSTRHLEIELPKEASYQEGDHLGVIPRNYEGIVNRVTARFGLSASQQIRLEAEEEKLAHLPLAKTVSVEELLQYVELQDPVTRTQLRAMAAKTVCPPHKVELEALLEKQAYKEQVLAKRLTMLELLEKYPACEMKFSEFIALLPSIRPRYYSISSSPRVDEKQASITVSVVSGPAWSGYGEYKGIASNYLAELQEGDTITCFISTDQSEFTLPKDPETPLIMVGPGTGVAPFRGFVQARKQLKEQGQSLGEAHLYFGCRSPHEDYLYQEELENAQSEGIITLHTAFSRMPNQPKTYVQHVMEQDGKKLIELLDQGAHFYICGDGSQMAPAVEATLMKSYADVHQVSEADARLWLQQLEEKGRYAKDVWAG

SEQ ID NO: 643 - DNA, 3147 bp, synthetic construct
  misc_feature 1..3147: note = Variant of cytochrome P450
  source 1..3147: mol_type = other DNA
atgacaattaaggaaatgcctcagcctaagacgtttggagaacttaaaaatttaccgttattaaacacagataaaccggttcaagctttgatgcgtattgcggatgaattaggagaaatctttaaattcgaggcgcctggtagcgtaacgcgctttttatcaagtcagcgtctaattaaagaagcatgcgatgaatcacgctttgataaaaacttaagtcaaggccttaaatttgcacgtgattttcttggagacgggttatttacaagctggacgcatgaaccgaattggaaaaaagcgcataatatcttaggcccaagctttagtcagcgtgcaatgaaacgttatcatgcgatgatggtcgatatcgccgtgcagcttgttcaaaagtgggagcgtctaaatgcagatgagcatattgaagtatcggaagacatgacacgtttaacgctggatacaattggtctttgcggcttcaactatcgctttaacagcttttaccgagatcagcctcatccatttattgtgagtgttgagcgtgcactggatgaagtaatgaacaagctgcagcgagcaaatccagacgacccagcttatgatgaaaacaagcgccagtgtcaagaagatatcaaggtgatgaacgactatgtcgataaaattattgcagatcgcaaagcaaggggtgaacaaagccatgatttattaacgcagatgctaaacggaaaagatccagaaacgggtgagccgcttgatgacgggaacattcgttatcaaattattacattcttaattgcgggacacgaaacaacaagtggtcttttatcatttgcgctgtatttcttagtgaaaaatccacatgtattacaaaaagtagcagaagaagcagcacgagttctagtagatcctgttccaagctacaaacaagtcaaacagcttaaatatgtcggcatggtcttaaacgaagcgctgcgcttatggccaactgctcctgcgttttccctatatgcaaaagaagatacgtgtcttggaggagaatatcctttaaccaaaggcgacgaagtaatggttctgattcctcagcttcaccgtgataaaacaatttggggagacgatgtggaggagttccgtccagagcgttttgaaaatccaagtgcgattccgcagcatgcgtttaaaccgtttggaaacggtcagcgtgcgtgtatcggtcagcagttcgctcttcatgaagcaacgctggtacttggtatgatgctaaaacactttgactttgaagatcatacaaactacgagctcgttattaaagaaaagttaacgttaaaacctgaaggctttgtggtaaaagcaaaatcgaaaggcattccgcttggcggtattccttcacctagcactgaacagtctgctaaaaaagtacgcaaaaaggcagaaaacgctcataatacgccgctgcttgtgctatacggttcaaatgcgggaacagctgaaggaacggcgcgtgatttagcagatattgcaatgagcaaaggatttgcaccgcaggtcgcaacgcttgattcacacgccggaaatcttccgcgcgaaggagctgtattaattgtaacggcgtcttataacggtcatccgcctgataacgcaaagcaatttgtcgactggttagaccaagcgtctgctgatgaagtaaaaggcgttcgctactccgtatttggatgcggcgataaaaactgggctgcgacgtatcaaaaagtgcctgcttttatcgatgaaacgcttgccgctaaaggggcagaaaacatcgctgaccgcggtgaagcagatgcaagcgacgactttgaaggcacatatgaagaatggagtgatcatatgtggagtgacgtagcagcctactttaacctcgacattgaaaacagtgaagataataaatctactctttcacttcaatttgtcgacagcgccgcggatatgccgcttgcgaaaatgcacggtgcgttttcaacgaacgtcgtagcaagcaaagaacttcaacagccaggcagtgcacgaagcacgcgacatcttgaaattgaacttccaaaagaagcttcttatcaagaaggagatcatttaggtgttattcctcgcaactatgaaggaatagtaaaccgtgtaacagcaaggttcggcctaagcgcatcacagcaaatccgtctggaagcagaagaagaaaaattagctcatttgccactcgctaaaacagtatccgtagaagagcttctgcaatacgtggagcttcaagatcctgttacgcgcacgcagcttcgcgcaatggctgctaaaacggtctgcccgccgcataaagtagagcttgaagccttgcttgaaaagcaagcctacaaagaacaagtgctggcaaaacgtttaacaatgcttgaactgcttgaaaaatacccggcgtgtgaaatgaaattcagcgaatttatcgcccttctgccaagcatacgcccgcgctattactcgatttcttcatcacctcgtgtcgatgaaaaacaagcaagcatcacggtcagcgttgtctcaggaccggcgtggagcggatatggagaatataaaggaattgcgtcgaactatcttgccgagctgcaagaaggagatacgattacgtgctttatttccacagatcagtcagaatttacgctgccaaaagaccctgaaacgccgcttatcatggtcggaccgggaacaggcgtcgcgccgtttagaggctttgtgcaggcgcgcaaacagctaaaagaacaaggacagtcacttggagaagcacatttatacttcggctgccgttcacctcatgaagactatctgtatcaagaagagcttgaaaacgcccaaagcgaaggcatcattacgcttcataccgctttttctcgcatgccaaatcagccgaaaacatacgttcagcacgtaatggaacaagacggcaagaaattgattgaacttcttgatcaaggagcgcacttctatatttgcggagacggaagccaaatggcacctgccgttgaagcaacgcttatgaaaagctatgctgacgttcaccaagtgagtgaagcagacgctcgcttatggctgcagcagctagaagaaaaaggccgatacgcaaaagacgtgtgggctggg

SEQ ID NO: 644 - protein, 1049 aa, synthetic construct
  REGION 1..1049: note = Variant of cytochrome P450
MTIKEMPQPKTFGELKNLPLLNTDKPVQALMRIADELGEIFKFEAPGSVTRFLSSQRLIKEACDESRFDKNLSQGLKFARDFLGDGLFTSWTHEPNWKKAHNILGPSFSQRAMKRYHAMMVDIAVQLVQKWERLNADEHIEVSEDMTRLTLDTIGLCGFNYRFNSFYRDQPHPFIVSVERALDEVMNKLQRANPDDPAYDENKRQCQEDIKVMNDYVDKIIADRKARGEQSHDLLTQMLNGKDPETGEPLDDGNIRYQIITFLIAGHETTSGLLSFALYFLVKNPHVLQKVAEEAARVLVDPVPSYKQVKQLKYVGMVLNEALRLWPTAPAFSLYAKEDTCLGGEYPLTKGDEVMVLIPQLHRDKTIWGDDVEEFRPERFENPSAIPQHAFKPFGNGQRACIGQQFALHEATLVLGMMLKHFDFEDHTNYELVIKEKLTLKPEGFVVKAKSKGIPLGGIPSPSTEQSAKKVRKKAENAHNTPLLVLYGSNAGTAEGTARDLADIAMSKGFAPQVATLDSHAGNLPREGAVLIVTASYNGHPPDNAKQFVDWLDQASADEVKGVRYSVFGCGDKNWAATYQKVPAFIDETLAAKGAENIADRGEADASDDFEGTYEEWSDHMWSDVAAYFNLDIENSEDNKSTLSLQFVDSAADMPLAKMHGAFSTNVVASKELQQPGSARSTRHLEIELPKEASYQEGDHLGVIPRNYEGIVNRVTARFGLSASQQIRLEAEEEKLAHLPLAKTVSVEELLQYVELQDPVTRTQLRAMAAKTVCPPHKVELEALLEKQAYKEQVLAKRLTMLELLEKYPACEMKFSEFIALLPSIRPRYYSISSSPRVDEKQASITVSVVSGPAWSGYGEYKGIASNYLAELQEGDTITCFISTDQSEFTLPKDPETPLIMVGPGTGVAPFRGFVQARKQLKEQGQSLGEAHLYFGCRSPHEDYLYQEELENAQSEGIITLHTAFSRMPNQPKTYVQHVMEQDGKKLIELLDQGAHFYICGDGSQMAPAVEATLMKSYADVHQVSEADARLWLQQLEEKGRYAKDVWAG

SEQ ID NO: 645 - DNA, 3147 bp, synthetic construct
  misc_feature 1..3147: note = Variant of cytochrome P450
  source 1..3147: mol_type = other DNA
atgacaattaaggaaatgcctcagcctaagacgtttggagaacttaaaaatttaccgttattaaacacagataaaccggttcaagctttgatgcgtattgcggatgaattaggagaaatctttaaattcgaggcgcctggtagcgtaacgcgctttttatcaagtcagcgtctaattaaagaagcatgcgatgaatcacgctttgataaaaacttaagtcaaggccttaaatttgcacgtgattttcttggagacgggttatttacaagctggacgcatgaaccgaattggaaaaaagcgcataatatcttaggcccaagctttagtcagcgtgcaatgaaacgttatcatgcgatgatggtcgatatcgccgtgcagcttgttcaaaagtgggagcgtctaaatgcagatgagcatattgaagtatcggaagacatgacacgtttaacgctggatacaattggtctttgcggcttcaactatcgctttaacagcttttaccgagatcagcctcatccatttattgtgagtgttgagcgtgcactggatgaagtaatgaacaagctgcagcgagcaaatccagacgacccagcttatgatgaaaacaagcgccagtgtcaagaagatatcaaggtgatgaacgactatgtcgataagattattgcagatcgcaaagcaaggggtgaacaaagccatgatttattaacgcagatgctaaacggaaaagatccagaaacgggtgagccgcttgatgacgggaacattcgttatcaaattattacattcttaattgcgggacacgaaacaacaagtggtcttttatcatttgcgctgtatttcttagtgaaaaatccacatgtattacaaaaagtagcagaagaagcagcacgagttctagtagatcctgttccaagctacaaacaagtcaaacagcttaaatatgtcggcatggtcttaaacgaagcgctgcgcttatggccaactgctcctgcgttttccctatatgcaaaagaagatacggtgcttggaggagaatatcctttaaccaaaggcgacgaagtaatggttctgattcctcagcttcaccgtgataaaacaatttggggagacgatcgtgaggagttccgtccagagcgttttgaaaatccaagtgcgattccgcagcatgcgtttaaaccgtttggaaacggtcagcgtgcgtgtatcggtcagcagttcgctcttcatgaagcaacgctggtacttggtatgatgctaaaacactttgactttgaagatcatacaaactacgagctcgttattaaagaaaagttaacgttaaaacctgaaggctttgtggtaaaagcaaaatcgaaaggcattccgcttggcggtattccttcacctagcactgaacagtctgctaaaaaagtacgcaaaaaggcagaaaacgctcataatacgccgctgcttgtgctatacggttcaaatgcgggaacagctgaaggaacggcgcgtgatttagcagatattgcaatgagcaaaggatttgcaccgcaggtcgcaacgcttgattcacacgccggaaatcttccgcgcgaaggagctgtattaattgtaacggcgtcttataacggtcatccgcctgataacgcaaagcaatttgtcgactggttagaccaagcgtctgctgatgaagtaaaaggcgttcgctactccgtatttggatgcggcgataaaaactgggctgcgacgtatcaaaaagtgcctgcttttatcgatgaaacgcttgccgctaaaggggcagaaaacatcgctgaccgcggtgaagcagatgcaagcgacgactttgaaggcacatatgaagaatggagtgatcatatgtggagtgacgtagcagcctactttaacctcgacattgaaaacagtgaagataataaatctactctttcacttcaatttgtcgacagcgccgcggatatgccgcttgcgaaaatgcacggtgcgttttcaacgaacgtcgtagcaagcaaagaacttcaacagccaggcagtgcacgaagcacgcgacatcttgaaattgaacttccaaaagaagcttcttatcaagaaggagatcatttaggtgttattcctcgcaactatgaaggaatagtaaaccgtgtaacagcaaggttcggcctaagcgcatcacagcaaatccgtctggaagcagaagaagaaaaattagctcatttgccactcgctaaaacagtatccgtagaagagcttctgcaatacgtggagcttcaagatcctgttacgcgcacgcagcttcgcgcaatggctgctaaaacggtctgcccgccgcataaagtagagcttgaagccttgcttgaaaagcaagcctacaaagaacaagtgctggcaaaacgtttaacaatgcttgaactgcttgaaaaatacccggcgtgtgaaatgaaattcagcgaatttatcgcccttctgccaagcatacgcccgcgctattactcgatttcttcatcacctcgtgtcgatgaaaaacaagcaagcatcacggtcagcgttgtctcaggaccggcgtggagcggatatggagaatataaaggaattgcgtcgaactatcttgccgagctgcaagaaggagatacgattacgtgctttatttccacagatcagtcagaatttacgctgccaaaagaccctgaaacgccgcttatcatggtcggaccgggaacaggcgtcgcgccgtttagaggctttgtgcaggcgcgcaaacagctaaaagaacaaggacagtcacttggagaagcacatttatacttcggctgccgttcacctcatgaagactatctgtatcaagaagagcttgaaaacgcccaaagcgaaggcatcattacgcttcataccgctttttctcgcatgccaaatcagccgaaaacatacgttcagcacgtaatggaacaagacggcaagaaattgattgaacttcttgatcaaggagcgcacttctatatttgcggagacggaagccaaatggcacctgccgttgaagcaacgcttatgaaaagctatgctgacgttcaccaagtgagtgaagcagacgctcgcttatggctgcagcagctagaagaaaaaggccgatacgcaaaagacgtgtgggctggg

SEQ ID NO: 646 - protein, 1049 aa, synthetic construct
  REGION 1..1049: note = Variant of cytochrome P450
MTIKEMPQPKTFGELKNLPLLNTDKPVQALMRIADELGEIFKFEAPGSVTRFLSSQRLIKEACDESRFDKNLSQGLKFARDFLGDGLFTSWTHEPNWKKAHNILGPSFSQRAMKRYHAMMVDIAVQLVQKWERLNADEHIEVSEDMTRLTLDTIGLCGFNYRFNSFYRDQPHPFIVSVERALDEVMNKLQRANPDDPAYDENKRQCQEDIKVMNDYVDKIIADRKARGEQSHDLLTQMLNGKDPETGEPLDDGNIRYQIITFLIAGHETTSGLLSFALYFLVKNPHVLQKVAEEAARVLVDPVPSYKQVKQLKYVGMVLNEALRLWPTAPAFSLYAKEDTVLGGEYPLTKGDEVMVLIPQLHRDKTIWGDDREEFRPERFENPSAIPQHAFKPFGNGQRACIGQQFALHEATLVLGMMLKHFDFEDHTNYELVIKEKLTLKPEGFVVKAKSKGIPLGGIPSPSTEQSAKKVRKKAENAHNTPLLVLYGSNAGTAEGTARDLADIAMSKGFAPQVATLDSHAGNLPREGAVLIVTASYNGHPPDNAKQFVDWLDQASADEVKGVRYSVFGCGDKNWAATYQKVPAFIDETLAAKGAENIADRGEADASDDFEGTYEEWSDHMWSDVAAYFNLDIENSEDNKSTLSLQFVDSAADMPLAKMHGAFSTNVVASKELQQPGSARSTRHLEIELPKEASYQEGDHLGVIPRNYEGIVNRVTARFGLSASQQIRLEAEEEKLAHLPLAKTVSVEELLQYVELQDPVTRTQLRAMAAKTVCPPHKVELEALLEKQAYKEQVLAKRLTMLELLEKYPACEMKFSEFIALLPSIRPRYYSISSSPRVDEKQASITVSVVSGPAWSGYGEYKGIASNYLAELQEGDTITCFISTDQSEFTLPKDPETPLIMVGPGTGVAPFRGFVQARKQLKEQGQSLGEAHLYFGCRSPHEDYLYQEELENAQSEGIITLHTAFSRMPNQPKTYVQHVMEQDGKKLIELLDQGAHFYICGDGSQMAPAVEATLMKSYADVHQVSEADARLWLQQLEEKGRYAKDVWAG

SEQ ID NO: 647 - DNA, 3147 bp, synthetic construct
  misc_feature 1..3147: note = Variant of cytochrome P450
  source 1..3147: mol_type = other DNA
atgacaattaaggaaatgcctcagcctaagacgtttggagaacttaaaaatttaccgttattaaacacagataaaccggttcaagctttgatgcgtattgcggatgaattaggagaaatctttaaattcgaggcgcctggtagcgtaacgcgctttttatcaagtcagcgtctaattaaagaagcatgcgatgaatcactgtttgataaaaacttaagtcaaggccttaaatttgcacgtgattttcttggagacgggttatttacaagctggacgcatgaaccgaattggaaaaaagcgcataatatcttaggcccaagctttagtcagcgtgcaatgaaacgttatcatgcgatgatggtcgatatcgccgtgcagcttgttcaaaagtgggagcgtctaaatgcagatgagcatattgaagtatcggaagacatgacacgtttaacgctggatacaattggtctttgcggcttcaactatcgctttaacagcttttaccgagatcagcctcatccatttattgtgagtgttgagcgtgcactggatgaagtaatgaacaagctgcagcgagcaaatccagacgacccagcttatgatgaaaacaagcgccagtgtcaagaagatatcaaggtgatgaacgactatgtcgataaaattattgcagatcgcaaagcaaggggtgaacaaagccatgatttattaacgcagatgctaaacggaaaagatccagaaacgggtgagccgcttgatgacgggaacattcgttatcaaattattacattcttaattgcgggacacgaaacaacaagtggtcttttatcatttgcgctgtatttcttagtgaaaaatccacatgtattacaaaaagtagcagaagaagcagcacgagttctagtagatcctgttccaagctacaaacaagtcaaacagcttaaatatgtcggcatggtcttaaacgaagcgctgcgcttatggccaactgctcctgcgttttccctatatgcaaaagaagatacggtgcttggaggagaatatcctttaaccaaaggcgacgaagtaatggttctgattcctcagcttcaccgtgataaaacaatttggggagacgatgtggaggagttccgtccagagcgttttgaaaatccaagtgcgattccgcagcatgcgtttaaaccgtttggaaacggtcagcgtgcgtgtatcggtcagcagttcgctcttcatgaagcaacgctggtacttggtatgatgctaaaacactttgactttgaagatcatacaaactacgagctcgttattaaagaaaagttaacgttaaaacctgaaggctttgtggtaaaagcaaaatcgaaaggcattccgcttggcggtattccttcacctagcactgaacagtctgctaaaaaagtacgcaaaaaggcagaaaacgctcataatacgccgctgcttgtgctatacggttcaaatgcgggaacagctgaaggaacggcgcgtgatttagcagatattgcaatgagcaaaggatttgcaccgcaggtcgcaacgcttgattcacacgccggaaatcttccgcgcgaaggagctgtattaattgtaacggcgtcttataacggtcatccgcctgataacgcaaagcaatttgtcgactggttagaccaagcgtctgctgatgaagtaaaaggcgttcgctactccgtatttggatgcggcgataaaaactgggctgcgacgtatcaaaaagtgcctgcttttatcgatgaaacgcttgccgctaaaggggcagaaaacatcgctgaccgcggtgaagcagatgcaagcgacgactttgaaggcacatatgaagaatggagtgatcatatgtggagtgacgtagcagcctactttaacctcgacattgaaaacagtgaagataataaatctactctttcacttcaatttgtcgacagcgccgcggatatgccgcttgcgaaaatgcacggtgcgttttcaacgaacgtcgtagcaagcaaagaacttcaacagccaggcagtgcacgaagcacgcgacatcttgaaattgaacttccaaaagaagcttcttatcaagaaggagatcatttaggtgttattcctcgcaactatgaaggaatagtaaaccgtgtaacagcaaggttcggcctaagcgcatcacagcaaatccgtctggaagcagaagaagaaaaattagctcatttgccactcgctaaaacagtatccgtagaagagcttctgcaatacgtggagcttcaagatcctgttacgcgcacgcagcttcgcgcaatggctgctaaaacggtctgcccgccgcataaagtagagcttgaagccttgcttgaaaagcaagcctacaaagaacaagtgctggcaaaacgtttaacaatgcttgaactgcttgaaaaatacccggcgtgtgaaatgaaattcagcgaatttatcgcccttctgccaagcatacgcccgcgctattactcgatttcttcatcacctcgtgtcgatgaaaaacaagcaagcatcacggtcagcgttgtctcaggaccggcgtggagcggatatggagaatataaaggaattgcgtcgaactatcttgccgagctgcaagaaggagatacgattacgtgctttatttccacagatcagtcagaatttacgctgccaaaagaccctgaaacgccgcttatcatggtcggaccgggaacaggcgtcgcgccgtttagaggctttgtgcaggcgcgcaaacagctaaaagaacaaggacagtcacttggagaagcacatttatacttcggctgccgttcacctcatgaagactatctgtatcaagaagagcttgaaaacgcccaaagcgaaggcatcattacgcttcataccgctttttctcgcatgccaaatcagccgaaaacatacgttcagcacgtaatggaacaagacggcaagaaattgattgaacttcttgatcaaggagcgcacttctatatttgcggagacggaagccaaatggcacctgccgttgaagcaacgcttatgaaaagctatgctgacgttcaccaagtgagtgaagcagacgctcgcttatggctgcagcagctagaagaaaaaggccgatacgcaaaagacgtgtgggctggg

SEQ ID NO: 648 - protein, 1049 aa, synthetic construct
  REGION 1..1049: note = Variant of cytochrome P450
MTIKEMPQPKTFGELKNLPLLNTDKPVQALMRIADELGEIFKFEAPGSVTRFLSSQRLIKEACDESLFDKNLSQGLKFARDFLGDGLFTSWTHEPNWKKAHNILGPSFSQRAMKRYHAMMVDIAVQLVQKWERLNADEHIEVSEDMTRLTLDTIGLCGFNYRFNSFYRDQPHPFIVSVERALDEVMNKLQRANPDDPAYDENKRQCQEDIKVMNDYVDKIIADRKARGEQSHDLLTQMLNGKDPETGEPLDDGNIRYQIITFLIAGHETTSGLLSFALYFLVKNPHVLQKVAEEAARVLVDPVPSYKQVKQLKYVGMVLNEALRLWPTAPAFSLYAKEDTVLGGEYPLTKGDEVMVLIPQLHRDKTIWGDDVEEFRPERFENPSAIPQHAFKPFGNGQRACIGQQFALHEATLVLGMMLKHFDFEDHTNYELVIKEKLTLKPEGFVVKAKSKGIPLGGIPSPSTEQSAKKVRKKAENAHNTPLLVLYGSNAGTAEGTARDLADIAMSKGFAPQVATLDSHAGNLPREGAVLIVTASYNGHPPDNAKQFVDWLDQASADEVKGVRYSVFGCGDKNWAATYQKVPAFIDETLAAKGAENIADRGEADASDDFEGTYEEWSDHMWSDVAAYFNLDIENSEDNKSTLSLQFVDSAADMPLAKMHGAFSTNVVASKELQQPGSARSTRHLEIELPKEASYQEGDHLGVIPRNYEGIVNRVTARFGLSASQQIRLEAEEEKLAHLPLAKTVSVEELLQYVELQDPVTRTQLRAMAAKTVCPPHKVELEALLEKQAYKEQVLAKRLTMLELLEKYPACEMKFSEFIALLPSIRPRYYSISSSPRVDEKQASITVSVVSGPAWSGYGEYKGIASNYLAELQEGDTITCFISTDQSEFTLPKDPETPLIMVGPGTGVAPFRGFVQARKQLKEQGQSLGEAHLYFGCRSPHEDYLYQEELENAQSEGIITLHTAFSRMPNQPKTYVQHVMEQDGKKLIELLDQGAHFYICGDGSQMAPAVEATLMKSYADVHQVSEADARLWLQQLEEKGRYAKDVWAG

SEQ ID NO: 649 - DNA, 3147 bp, synthetic construct
  misc_feature 1..3147: note = Variant of cytochrome P450
  source 1..3147: mol_type = other DNA
atgacaattaaggaaatgcctcagcctaagacgtttggagaacttaaaaatttaccgttattaaacacagataaaccggttcaagctttgatgcgtattgcggatgaattaggagaaatctttaaattcgaggcgcctggtagcgtaacgcgctttttatcaagtcagcgtctaattaaagaagcatgcgatgaatcacgctttgataaaaacttaagtcaaggccttaaatttgcacgtgattttcttggagacgggttatttacaagctggacgcatgaaccgaattggaaaaaagcgcataatatcttaggcccaagctttagtcagcgtgcaatgaaacgttatcatgcgatgatggtcgatatcgccgtgcagcttgttcaaaagtgggagcgtctaaatgcagatgagcatattgaagtatcggaagacatgacacgtttaacgctggatacaattggtctttgcggcttcaactatcgctttaacagcttttaccgagatcagcctcatccatttattgtgagtgttgagcgtgcactggatgaagtaatgaacaagctgcagcgagcaaatccagacgacccagcttatgatgaaaacaagcgccagtgtcaagaagatatcaaggtgatgaacgactatgtcgataaaattattgcagatcgcaaagcaaggggtgaacaaagccatgatttattaacgcagatgctaaacggaaaagatccagaaacgggtgagccgcttgatgacgggaacattcgttatcaaattattacattcttaattgcgggacacgaaacaacaagtggtcttttatcatttgcgctgtatttcttagtgaaaaatccacatgtattacaaaaagtagcagaagaagcagcacgagttctagtagatcctgttccaagctacaaacaagtcaaacagcttaaatatgtcggcatggtcttaaacgaagcgctgcgcttatggccaactgctcctgcgttttccctatatgcaaaagaagatacggtgcttggaggagaatatcctttaaccaaaggcgacgaagtaatggttctgattcctcagcttcaccgtgataaaacaatttggggagacgatgtggaggcgttccgtccagagcgttttgaaaatccaagtgcgattccgcagcatgcgtttaaaccgtttggaaacggtcagcgtgcgtgtatcggtcagcagttcgctcttcatgaagcaacgctggtacttggtatgatgctaaaacactttgactttgaagatcatacaaactacgagctcgttattaaagaaaagttaacgttaaaacctgaaggctttgtggtaaaagcaaaatcgaaaggcattccgcttggcggtattccttcacctagcactgaacagtctgctaaaaaagtacgcaaaaaggcagaaaacgctcataatacgccgctgcttgtgctatacggttcaaatgcgggaacagctgaaggaacggcgcgtgatttagcagatattgcaatgagcaaaggatttgcaccgcaggtcgcaacgcttgattcacacgccggaaatcttccgcgcgaaggagctgtattaattgtaacggcgtcttataacggtcatccgcctgataacgcaaagcaatttgtcgactggttagaccaagcgtctgctgatgaagtaaaaggcgttcgctactccgtatttggatgcggcgataaaaactgggctgcgacgtatcaaaaagtgcctgcttttatcgatgaaacgcttgccgctaaaggggcagaaaacatcgctgaccgcggtgaagcagatgcaagcgacgactttgaaggcacatatgaagaatggagtgatcatatgtggagtgacgtagcagcctactttaacctcgacattgaaaacagtgaagataataaatctactctttcacttcaatttgtcgacagcgccgcggatatgccgcttgcgaaaatgcacggtgcgttttcaacgaacgtcgtagcaagcaaagaacttcaacagccaggcagtgcacgaagcacgcgacatcttgaaattgaacttccaaaagaagcttcttatcaagaaggagatcatttaggtgttattcctcgcaactatgaaggaatagtaaaccgtgtaacagcaaggttcggcctaagcgcatcacagcaaatccgtctggaagcagaagaagaaaaattagctcatttgccactcgctaaaacagtatccgtagaagagcttctgcaatacgtggagcttcaagatcctgttacgcgcacgcagcttcgcgcaatggctgctaaaacggtctgcccgccgcataaagtagagcttgaagccttgcttgaaaagcaagcctacaaagaacaagtgctggcaaaacgtttaacaatgcttgaactgcttgaaaaatacccggcgtgtgaaatgaaattcagcgaatttatcgcccttctgccaagcatacgcccgcgctattactcgatttcttcatcacctcgtgtcgatgaaaaacaagcaagcatcacggtcagcgttgtctcaggaccggcgtggagcggatatggagaatataaaggaattgcgtcgaactatcttgccgagctgcaagaaggagatacgattacgtgctttatttccacagatcagtcagaatttacgctgccaaaagaccctgaaacgccgcttatcatggtcggaccgggaacaggcgtcgcgccgtttagaggctttgtgcaggcgcgcaaacagctaaaagaacaaggacagtcacttggagaagcacatttatacttcggctgccgttcacctcatgaagactatctgtatcaagaagagcttgaaaacgcccaaagcgaaggcatcattacgcttcataccgctttttctcgcatgccaaatcagccgaaaacatacgttcagcacgtaatggaacaagacggcaagaaattgattgaacttcttgatcaaggagcgcacttctatatttgcggagacggaagccaaatggcacctgccgttgaagcaacgcttatgaaaagctatgctgacgttcaccaagtgagtgaagcagacgctcgcttatggctgcagcagctagaagaaaaaggccgatacgcaaaagacgtgtgggctggg

SEQ ID NO: 650 - protein, 1049 aa, synthetic construct
  REGION 1..1049: note = Variant of cytochrome P450
MTIKEMPQPKTFGELKNLPLLNTDKPVQALMRIADELGEIFKFEAPGSVTRFLSSQRLIKEACDESRFDKNLSQGLKFARDFLGDGLFTSWTHEPNWKKAHNILGPSFSQRAMKRYHAMMVDIAVQLVQKWERLNADEHIEVSEDMTRLTLDTIGLCGFNYRFNSFYRDQPHPFIVSVERALDEVMNKLQRANPDDPAYDENKRQCQEDIKVMNDYVDKIIADRKARGEQSHDLLTQMLNGKDPETGEPLDDGNIRYQIITFLIAGHETTSGLLSFALYFLVKNPHVLQKVAEEAARVLVDPVPSYKQVKQLKYVGMVLNEALRLWPTAPAFSLYAKEDTVLGGEYPLTKGDEVMVLIPQLHRDKTIWGDDVEAFRPERFENPSAIPQHAFKPFGNGQRACIGQQFALHEATLVLGMMLKHFDFEDHTNYELVIKEKLTLKPEGFVVKAKSKGIPLGGIPSPSTEQSAKKVRKKAENAHNTPLLVLYGSNAGTAEGTARDLADIAMSKGFAPQVATLDSHAGNLPREGAVLIVTASYNGHPPDNAKQFVDWLDQASADEVKGVRYSVFGCGDKNWAATYQKVPAFIDETLAAKGAENIADRGEADASDDFEGTYEEWSDHMWSDVAAYFNLDIENSEDNKSTLSLQFVDSAADMPLAKMHGAFSTNVVASKELQQPGSARSTRHLEIELPKEASYQEGDHLGVIPRNYEGIVNRVTARFGLSASQQIRLEAEEEKLAHLPLAKTVSVEELLQYVELQDPVTRTQLRAMAAKTVCPPHKVELEALLEKQAYKEQVLAKRLTMLELLEKYPACEMKFSEFIALLPSIRPRYYSISSSPRVDEKQASITVSVVSGPAWSGYGEYKGIASNYLAELQEGDTITCFISTDQSEFTLPKDPETPLIMVGPGTGVAPFRGFVQARKQLKEQGQSLGEAHLYFGCRSPHEDYLYQEELENAQSEGIITLHTAFSRMPNQPKTYVQHVMEQDGKKLIELLDQGAHFYICGDGSQMAPAVEATLMKSYADVHQVSEADARLWLQQLEEKGRYAKDVWAG

SEQ ID NO: 651 - DNA, 3147 bp, synthetic construct
  misc_feature 1..3147: note = Variant of cytochrome P450
  source 1..3147: mol_type = other DNA
atgacaattaaggaaatgcctcagcctaagacgtttggagaacttaaaaatttaccgttattaaacacagataaaccggttcaagctttgatgcgtattgcggatgaattaggagaaatctttaaattcgaggcgcctggtagcgtaacgcgctttttatcaagtcagcgtctaattaaagaagcatgcgatgaatcacgctttgataaaaacttaagtcaaggccttaaatttgcacgtgattttcttggagacgggttatttacaagctggacgcatgaaccgaattggaaaaaagcgcataatatcttaggcccaagctttagtcagcgtgcaatgaaacgttatcatgcgatgatggtcgatatcgccgtgcagcttgttcaaaagtgggagcgtctaaatgcagatgagcatattgaagtatcggaagacatgacacgtttaacgctggatacaattggtctttgcggcttcaactatcgctttaacagcttttaccgagatcagcctcatccatttattgtgagtgttgagcgtgcactggatgaagtaatgaacaagctgcagcgagcaaatccagacgacccagcttatgatgaaaacaagcgccagtgtcaagaagatatcaaggtgatgaacgactatgtcgataaaattattgcagatcgcaaagcaaggggtgaacaaagccatgatttattaacgcagatgctaaacggaaaagatccagctacgggtgagccgcttgatgacgggaacattcgttatcaaattattacattcttaattgcgggacacgaaacaacaagtggtcttttatcatttgcgctgtatttcttagtgaaaaatccacatgtattacaaaaagtagcagaagaagcagcacgagttctagtagatcctgttccaagctacaaacaagtcaaacagcttaaatatgtcggcatggtcttaaacgaagcgctgcgcttatggccaactgctcctgcgttttccctatatgcaaaagaagatacggtgcttggaggagaatatcctttaaccaaaggcgacgaagtaatggttctgattcctcagcttcaccgtgataaaacaatttggggagacgatgtggaggagttccgtccagagcgttttgaaaatccaagtgcgattccgcagcatgcgtttaaaccgtttggaaacggtcagcgtgcgtgtatcggtcagcagttcgctcttcatgaagcaacgctggtacttggtatgatgctaaaacactttgactttgaagatcatacaaactacgagctcgttattaaagaaaagttaacgttaaaacctgaaggctttgtggtaaaagcaaaatcgaaaggcattccgcttggcggtattccttcacctagcactgaacagtctgctaaaaaagtacgcaaaaaggcagaaaacgctcataatacgccgctgcttgtgctatacggttcaaatgcgggaacagctgaaggaacggcgcgtgatttagcagatattgcaatgagcaaaggatttgcaccgcaggtcgcaacgcttgattcacacgccggaaatcttccgcgcgaaggagctgtattaattgtaacggcgtcttataacggtcatccgcctgataacgcaaagcaatttgtcgactggttagaccaagcgtctgctgatgaagtaaaaggcgttcgctactccgtatttggatgcggcgataaaaactgggctgcgacgtatcaaaaagtgcctgcttttatcgatgaaacgcttgccgctaaaggggcagaaaacatcgctgaccgcggtgaagcagatgcaagcgacgactttgaaggcacatatgaagaatggagtgatcatatgtggagtgacgtagcagcctactttaacctcgacattgaaaacagtgaagataataaatctactctttcacttcaatttgtcgacagcgccgcggatatgccgcttgcgaaaatgcacggtgcgttttcaacgaacgtcgtagcaagcaaagaacttcaacagccaggcagtgcacgaagcacgcgacatcttgaaattgaacttccaaaagaagcttcttatcaagaaggagatcatttaggtgttattcctcgcaactatgaaggaatagtaaaccgtgtaacagcaaggttcggcctaagcgcatcacagcaaatccgtctggaagcagaagaagaaaaattagctcatttgccactcgctaaaacagtatccgtagaagagcttctgcaatacgtggagcttcaagatcctgttacgcgcacgcagcttcgcgcaatggctgctaaaacggtctgcccgccgcataaagtagagcttgaagccttgcttgaaaagcaagcctacaaagaacaagtgctggcaaaacgtttaacaatgcttgaactgcttgaaaaatacccggcgtgtgaaatgaaattcagcgaatttatcgcccttctgccaagcatacgcccgcgctattactcgatttcttcatcacctcgtgtcgatgaaaaacaagcaagcatcacggtcagcgttgtctcaggaccggcgtggagcggatatggagaatataaaggaattgcgtcgaactatcttgccgagctgcaagaaggagatacgattacgtgctttatttccacagatcagtcagaatttacgctgccaaaagaccctgaaacgccgcttatcatggtcggaccgggaacaggcgtcgcgccgtttagaggctttgtgcaggcgcgcaaacagctaaaagaacaaggacagtcacttggagaagcacatttatacttcggctgccgttcacctcatgaagactatctgtatcaagaagagcttgaaaacgcccaaagcgaaggcatcattacgcttcataccgctttttctcgcatgccaaatcagccgaaaacatacgttcagcacgtaatggaacaagacggcaagaaattgattgaacttcttgatcaaggagcgcacttctatatttgcggagacggaagccaaatggcacctgccgttgaagcaacgcttatgaaaagctatgctgacgttcaccaagtgagtgaagcagacgctcgcttatggctgcagcagctagaagaaaaaggccgatacgcaaaagacgtgtgggctggg

SEQ ID NO: 652 - protein, 1049 aa, synthetic construct
  REGION 1..1049: note = Variant of cytochrome P450
MTIKEMPQPKTFGELKNLPLLNTDKPVQALMRIADELGEIFKFEAPGSVTRFLSSQRLIKEACDESRFDKNLSQGLKFARDFLGDGLFTSWTHEPNWKKAHNILGPSFSQRAMKRYHAMMVDIAVQLVQKWERLNADEHIEVSEDMTRLTLDTIGLCGFNYRFNSFYRDQPHPFIVSVERALDEVMNKLQRANPDDPAYDENKRQCQEDIKVMNDYVDKIIADRKARGEQSHDLLTQMLNGKDPATGEPLDDGNIRYQIITFLIAGHETTSGLLSFALYFLVKNPHVLQKVAEEAARVLVDPVPSYKQVKQLKYVGMVLNEALRLWPTAPAFSLYAKEDTVLGGEYPLTKGDEVMVLIPQLHRDKTIWGDDVEEFRPERFENPSAIPQHAFKPFGNGQRACIGQQFALHEATLVLGMMLKHFDFEDHTNYELVIKEKLTLKPEGFVVKAKSKGIPLGGIPSPSTEQSAKKVRKKAENAHNTPLLVLYGSNAGTAEGTARDLADIAMSKGFAPQVATLDSHAGNLPREGAVLIVTASYNGHPPDNAKQFVDWLDQASADEVKGVRYSVFGCGDKNWAATYQKVPAFIDETLAAKGAENIADRGEADASDDFEGTYEEWSDHMWSDVAAYFNLDIENSEDNKSTLSLQFVDSAADMPLAKMHGAFSTNVVASKELQQPGSARSTRHLEIELPKEASYQEGDHLGVIPRNYEGIVNRVTARFGLSASQQIRLEAEEEKLAHLPLAKTVSVEELLQYVELQDPVTRTQLRAMAAKTVCPPHKVELEALLEKQAYKEQVLAKRLTMLELLEKYPACEMKFSEFIALLPSIRPRYYSISSSPRVDEKQASITVSVVSGPAWSGYGEYKGIASNYLAELQEGDTITCFISTDQSEFTLPKDPETPLIMVGPGTGVAPFRGFVQARKQLKEQGQSLGEAHLYFGCRSPHEDYLYQEELENAQSEGIITLHTAFSRMPNQPKTYVQHVMEQDGKKLIELLDQGAHFYICGDGSQMAPAVEATLMKSYADVHQVSEADARLWLQQLEEKGRYAKDVWAG

SEQ ID NO: 653 - DNA, 3147 bp, synthetic construct
  misc_feature 1..3147: note = Variant of cytochrome P450
  source 1..3147: mol_type = other DNA
atgacaattaaggaaatgcctcagcctaagacgtttggagaacttaaaaatttaccgttattaaacacagataaaccggttcaagctttgatgcgtattgcggatgaattaggagaaatctttaaattcgaggcgcctggtagcgtaacgcgctttttatcaagtcagcgtctaattaaagaagcatgcgatgaatcacgctttgataaaaacttaagtaagggccttaaatttgcacgtgattttcttggagacgggttatttacaagctggacgcatgaaccgaattggaaaaaagcgcataatatcttaggcccaagctttagtcagcgtgcaatgaaacgttatcatgcgatgatggtcgatatcgccgtgcagcttgttcaaaagtgggagcgtctaaatgcagatgagcatattgaagtatcggaagacatgacacgtttaacgctggatacaattggtctttgcggcttcaactatcgctttaacagcttttaccgagatcagcctcatccatttattgtgagtgttgagcgtgcactggatgaagtaatgaacaagctgcagcgagcaaatccagacgacccagcttatgatgaaaacaagcgccagtgtcaagaagatatcaaggtgatgaacgactatgtcgataaaattattgcagatcgcaaagcaaggggtgaacaaagccatgatttattaacgcagatgctaaacggaaaagatccagaaacgggtgagccgcttgatgacgggaacattcgttatcaaattattacattcttaattgcgggacacgaaacaacaagtggtcttttatcatttgcgctgtatttcttagtgaaaaatccacatgtattacaaaaagtagcagaagaagcagcacgagttctagtagatcctgttccaagctacaaacaagtcaaacagcttaaatatgtcggcatggtcttaaacgaagcgctgcgcttatggccaactgctcctgcgttttccctatatgcaaaagaagatacggtgcttggaggagaatatcctttaaccaaaggcgacgaagtaatggttctgattcctcagcttcaccgtgataaaacaatttggggagacgatgtggaggagttccgtccagagcgttttgaaaatccaagtgcgattccgcagcatgcgtttaaaccgtttggaaacggtcagcgtgcgtgtatcggtcagcagttcgctcttcatgaagcaacgctggtacttggtatgatgctaaaacactttgactttgaagatcatacaaactacgagctcgttattaaagaaaagttaacgttaaaacctgaaggctttgtggtaaaagcaaaatcgaaaggcattccgcttggcggtattccttcacctagcactgaacagtctgctaaaaaagtacgcaaaaaggcagaaaacgctcataatacgccgctgcttgtgctatacggttcaaatgcgggaacagctgaaggaacggcgcgtgatttagcagatattgcaatgagcaaaggatttgcaccgcaggtcgcaacgcttgattcacacgccggaaatcttccgcgcgaaggagctgtattaattgtaacggcgtcttataacggtcatccgcctgataacgcaaagcaatttgtcgactggttagaccaagcgtctgctgatgaagtaaaaggcgttcgctactccgtatttggatgcggcgataaaaactgggctgcgacgtatcaaaaagtgcctgcttttatcgatgaaacgcttgccgctaaaggggcagaaaacatcgctgaccgcggtgaagcagatgcaagcgacgactttgaaggcacatatgaagaatggagtgatcatatgtggagtgacgtagcagcctactttaacctcgacattgaaaacagtgaagataataaatctactctttcacttcaatttgtcgacagcgccgcggatatgccgcttgcgaaaatgcacggtgcgttttcaacgaacgtcgtagcaagcaaagaacttcaacagccaggcagtgcacgaagcacgcgacatcttgaaattgaacttccaaaagaagcttcttatcaagaaggagatcatttaggtgttattcctcgcaactatgaaggaatagtaaaccgtgtaacagcaaggttcggcctaagcgcatcacagcaaatccgtctggaagcagaagaagaaaaattagctcatttgccactcgctaaaacagtatccgtagaagagcttctgcaatacgtggagcttcaagatcctgttacgcgcacgcagcttcgcgcaatggctgctaaaacggtctgcccgccgcataaagtagagcttgaagccttgcttgaaaagcaagcctacaaagaacaagtgctggcaaaacgtttaacaatgcttgaactgcttgaaaaatacccggcgtgtgaaatgaaattcagcgaatttatcgcccttctgccaagcatacgcccgcgctattactcgatttcttcatcacctcgtgtcgatgaaaaacaagcaagcatcacggtcagcgttgtctcaggaccggcgtggagcggatatggagaatataaaggaattgcgtcgaactatcttgccgagctgcaagaaggagatacgattacgtgctttatttccacagatcagtcagaatttacgctgccaaaagaccctgaaacgccgcttatcatggtcggaccgggaacaggcgtcgcgccgtttagaggctttgtgcaggcgcgcaaacagctaaaagaacaaggacagtcacttggagaagcacatttatacttcggctgccgttcacctcatgaagactatctgtatcaagaagagcttgaaaacgcccaaagcgaaggcatcattacgcttcataccgctttttctcgcatgccaaatcagccgaaaacatacgttcagcacgtaatggaacaagacggcaagaaattgattgaacttcttgatcaaggagcgcacttctatatttgcggagacggaagccaaatggcacctgccgttgaagcaacgcttatgaaaagctatgctgacgttcaccaagtgagtgaagcagacgctcgcttatggctgcagcagctagaagaaaaaggccgatacgcaaaagacgtgtgggctggg

SEQ ID NO: 654 - protein, 1049 aa, synthetic construct
  REGION 1..1049: note = Variant of cytochrome P450
MTIKEMPQPKTFGELKNLPLLNTDKPVQALMRIADELGEIFKFEAPGSVTRFLSSQRLIKEACDESRFDKNLSKGLKFARDFLGDGLFTSWTHEPNWKKAHNILGPSFSQRAMKRYHAMMVDIAVQLVQKWERLNADEHIEVSEDMTRLTLDTIGLCGFNYRFNSFYRDQPHPFIVSVERALDEVMNKLQRANPDDPAYDENKRQCQEDIKVMNDYVDKIIADRKARGEQSHDLLTQMLNGKDPETGEPLDDGNIRYQIITFLIAGHETTSGLLSFALYFLVKNPHVLQKVAEEAARVLVDPVPSYKQVKQLKYVGMVLNEALRLWPTAPAFSLYAKEDTVLGGEYPLTKGDEVMVLIPQLHRDKTIWGDDVEEFRPERFENPSAIPQHAFKPFGNGQRACIGQQFALHEATLVLGMMLKHFDFEDHTNYELVIKEKLTLKPEGFVVKAKSKGIPLGGIPSPSTEQSAKKVRKKAENAHNTPLLVLYGSNAGTAEGTARDLADIAMSKGFAPQVATLDSHAGNLPREGAVLIVTASYNGHPPDNAKQFVDWLDQASADEVKGVRYSVFGCGDKNWAATYQKVPAFIDETLAAKGAENIADRGEADASDDFEGTYEEWSDHMWSDVAAYFNLDIENSEDNKSTLSLQFVDSAADMPLAKMHGAFSTNVVASKELQQPGSARSTRHLEIELPKEASYQEGDHLGVIPRNYEGIVNRVTARFGLSASQQIRLEAEEEKLAHLPLAKTVSVEELLQYVELQDPVTRTQLRAMAAKTVCPPHKVELEALLEKQAYKEQVLAKRLTMLELLEKYPACEMKFSEFIALLPSIRPRYYSISSSPRVDEKQASITVSVVSGPAWSGYGEYKGIASNYLAELQEGDTITCFISTDQSEFTLPKDPETPLIMVGPGTGVAPFRGFVQARKQLKEQGQSLGEAHLYFGCRSPHEDYLYQEELENAQSEGIITLHTAFSRMPNQPKTYVQHVMEQDGKKLIELLDQGAHFYICGDGSQMAPAVEATLMKSYADVHQVSEADARLWLQQLEEKGRYAKDVWAG

SEQ ID NO: 655 - DNA, 3147 bp, synthetic construct
  misc_feature 1..3147: note = Variant of cytochrome P450
  source 1..3147: mol_type = other DNA
atgacaattaaggaaatgcctcagcctaagacgtttggagaacttaaaaatttaccgttattaaacacagataaaccggttcaagctttgatgcgtattgcggatgaattaggagaaatctttaaattcgaggcgcctggtagcgtaacgcgctttttatcaagtcagcgtctaattaaagaagcatgcgatgaatcacgctttgataaaaacttaagtcaaggccttaaatttgcacgtgattttcttggagacgggttatttacaagctggacgcatgaaccgaattggaaaaaagcgcataatatcttaggcccaagctttagtcagcatgcaatgaaacgttatcatgcgatgatggtcgatatcgccgtgcagcttgttcaaaagtgggagcgtctaaatgcagatgagcatattgaagtatcggaagacatgacacgtttaacgctggatacaattggtctttgcggcttcaactatcgctttaacagcttttaccgagatcagcctcatccatttattgtgagtgttgagcgtgcactggatgaagtaatgaacaagctgcagcgagcaaatccagacgacccagcttatgatgaaaacaagcgccagtgtcaagaagatatcaaggtgatgaacgactatgtcgataaaattattgcagatcgcaaagcaaggggtgaacaaagccatgatttattaacgcagatgctaaacggaaaagatccagaaacgggtgagccgcttgatgacgggaacattcgttatcaaattattacattcttaattgcgggacacgaaacaacaagtggtcttttatcatttgcgctgtatttcttagtgaaaaatccacatgtattacaaaaagtagcagaagaagcagcacgagttctagtagatcctgttccaagctacaaacaagtcaaacagcttaaatatgtcggcatggtcttaaacgaagcgctgcgcttatggccaactgctcctgcgttttccctatatgcaaaagaagatacggtgcttggaggagaatatcctttaaccaaaggcgacgaagtaatggttctgattcctcagcttcaccgtgataaaacaatttggggagacgatgtggaggagttccgtccagagcgttttgaaaatccaagtgcgattccgcagcatgcgtttaaaccgtttggaaacggtcagcgtgcgtgtatcggtcagcagttcgctcttcatgaagcaacgctggtacttggtatgatgctaaaacactttgactttgaagatcatacaaactacgagctcgttattaaagaaaagttaacgttaaaacctgaaggctttgtggtaaaagcaaaatcgaaaggcattccgcttggcggtattccttcacctagcactgaacagtctgctaaaaaagtacgcaaaaaggcagaaaacgctcataatacgccgctgcttgtgctatacggttcaaatgcgggaacagctgaaggaacggcgcgtgatttagcagatattgcaatgagcaaaggatttgcaccgcaggtcgcaacgcttgattcacacgccggaaatcttccgcgcgaaggagctgtattaattgtaacggcgtcttataacggtcatccgcctgataacgcaaagcaatttgtcgactggttagaccaagcgtctgctgatgaagtaaaaggcgttcgctactccgtatttggatgcggcgataaaaactgggctgcgacgtatcaaaaagtgcctgcttttatcgatgaaacgcttgccgctaaaggggcagaaaacatcgctgaccgcggtgaagcagatgcaagcgacgactttgaaggcacatatgaagaatggagtgatcatatgtggagtgacgtagcagcctactttaacctcgacattgaaaacagtgaagataataaatctactctttcacttcaatttgtcgacagcgccgcggatatgccgcttgcgaaaatgcacggtgcgttttcaacgaacgtcgtagcaagcaaagaacttcaacagccaggcagtgcacgaagcacgcgacatcttgaaattgaacttccaaaagaagcttcttatcaagaaggagatcatttaggtgttattcctcgcaactatgaaggaatagtaaaccgtgtaacagcaaggttcggcctaagcgcatcacagcaaatccgtctggaagcagaagaagaaaaattagctcatttgccactcgctaaaacagtatccgtagaagagcttctgcaatacgtggagcttcaagatcctgttacgcgcacgcagcttcgcgcaatggctgctaaaacggtctgcccgccgcataaagtagagcttgaagccttgcttgaaaagcaagcctacaaagaacaagtgctggcaaaacgtttaacaatgcttgaactgcttgaaaaatacccggcgtgtgaaatgaaattcagcgaatttatcgcccttctgccaagcatacgcccgcgctattactcgatttcttcatcacctcgtgtcgatgaaaaacaagcaagcatcacggtcagcgttgtctcaggaccggcgtggagcggatatggagaatataaaggaattgcgtcgaactatcttgccgagctgcaagaaggagatacgattacgtgctttatttccacagatcagtcagaatttacgctgccaaaagaccctgaaacgccgcttatcatggtcggaccgggaacaggcgtcgcgccgtttagaggctttgtgcaggcgcgcaaacagctaaaagaacaaggacagtcacttggagaagcacatttatacttcggctgccgttcacctcatgaagactatctgtatcaagaagagcttgaaaacgcccaaagcgaaggcatcattacgcttcataccgctttttctcgcatgccaaatcagccgaaaacatacgttcagcacgtaatggaacaagacggcaagaaattgattgaacttcttgatcaaggagcgcacttctatatttgcggagacggaagccaaatggcacctgccgttgaagcaacgcttatgaaaagctatgctgacgttcaccaagtgagtgaagcagacgctcgcttatggctgcagcagctagaagaaaaaggccgatacgcaaaagacgtgtgggctggg

SEQ ID NO: 656 - protein, 1049 aa, synthetic construct
  REGION 1..1049: note = Variant of cytochrome P450
MTIKEMPQPKTFGELKNLPLLNTDKPVQALMRIADELGEIFKFEAPGSVTRFLSSQRLIKEACDESRFDKNLSQGLKFARDFLGDGLFTSWTHEPNWKKAHNILGPSFSQHAMKRYHAMMVDIAVQLVQKWERLNADEHIEVSEDMTRLTLDTIGLCGFNYRFNSFYRDQPHPFIVSVERALDEVMNKLQRANPDDPAYDENKRQCQEDIKVMNDYVDKIIADRKARGEQSHDLLTQMLNGKDPETGEPLDDGNIRYQIITFLIAGHETTSGLLSFALYFLVKNPHVLQKVAEEAARVLVDPVPSYKQVKQLKYVGMVLNEALRLWPTAPAFSLYAKEDTVLGGEYPLTKGDEVMVLIPQLHRDKTIWGDDVEEFRPERFENPSAIPQHAFKPFGNGQRACIGQQFALHEATLVLGMMLKHFDFEDHTNYELVIKEKLTLKPEGFVVKAKSKGIPLGGIPSPSTEQSAKKVRKKAENAHNTPLLVLYGSNAGTAEGTARDLADIAMSKGFAPQVATLDSHAGNLPREGAVLIVTASYNGHPPDNAKQFVDWLDQASADEVKGVRYSVFGCGDKNWAATYQKVPAFIDETLAAKGAENIADRGEADASDDFEGTYEEWSDHMWSDVAAYFNLDIENSEDNKSTLSLQFVDSAADMPLAKMHGAFSTNVVASKELQQPGSARSTRHLEIELPKEASYQEGDHLGVIPRNYEGIVNRVTARFGLSASQQIRLEAEEEKLAHLPLAKTVSVEELLQYVELQDPVTRTQLRAMAAKTVCPPHKVELEALLEKQAYKEQVLAKRLTMLELLEKYPACEMKFSEFIALLPSIRPRYYSISSSPRVDEKQASITVSVVSGPAWSGYGEYKGIASNYLAELQEGDTITCFISTDQSEFTLPKDPETPLIMVGPGTGVAPFRGFVQARKQLKEQGQSLGEAHLYFGCRSPHEDYLYQEELENAQSEGIITLHTAFSRMPNQPKTYVQHVMEQDGKKLIELLDQGAHFYICGDGSQMAPAVEATLMKSYADVHQVSEADARLWLQQLEEKGRYAKDVWAG

SEQ ID NO: 657 - DNA, 3147 bp, synthetic construct
  misc_feature 1..3147: note = Variant of cytochrome P450
  source 1..3147: mol_type = other DNA
atgacaattaaggaaatgcctcagcctaagacgtttggagaacttaaaaatttaccgttattaaacacagataaaccggttcaagctttgatgcgtattgcggatgaattaggagaaatctttaaattcgaggcgcctggtagcgtaacgcgctttttatcaagtcagcgtctaattaaagaagcatgcgatgaatcacgctttgataaaaacttaagtcaaggccttaaatttgcacgtgattttcttggagacgggttatttacaagctggacgcatgaaccgaattggaaaaaagcgcataatatcttaggcccaagctttagtcagcgtgcaatgaaacgttatcatgcgatgatggtcgatatcgccgtgcagcttgttcaaaagtgggagcgtctaaatgcagatgagcatattgaagtatcggaagacatgacacgtttaacgctggatacaattggtctttgcggcttcaactatcgctttaacagcttttaccgagatcagcctcatccatttattgtgagtgttgagcgtgcactggatgaagtaatgaacaagctgcagcgagcaaatccagacgacccagcttatgatgaaaacaagcgccagtgtcaagaagatatcaaggtgatgaacgactatgtcgataaaattattgcagatcgcaaagcaaggggtgaacaaagccatgatttattaacgcagatgctaaacggaaaagatccagaaacgggtgagccgcttgatgacgggaacattcgttatcaaattattacattcttaattgcgggacacgaaacaacaagtggtcttttatcatttgcgctgtatttcttagtgaaaaatccacatgtattacaaaaagtagcagaagaagcagcacgagttctagtagatcctgttccaagctacaaacaagtcaaacagcttaaatatgtcggcatggtcttaaacgaagcgctgcgcttatggccaactgctcctgcgttttccctatatgcaaaagaagatacggtgcttggaggagaatatcctttaaccaaaggcgacgaagtaatggttctgattcctcagcttcaccgtgataaaacaatttggggagacgattttgaggagttccgtccagagcgttttgaaaatccaagtgcgattccgcagcatgcgtttaaaccgtttggaaacggtcagcgtgcgtgtatcggtcagcagttcgctcttcatgaagcaacgctggtacttggtatgatgctaaaacactttgactttgaagatcatacaaactacgagctcgttattaaagaaaagttaacgttaaaacctgaaggctttgtggtaaaagcaaaatcgaaaggcattccgcttggcggtattccttcacctagcactgaacagtctgctaaaaaagtacgcaaaaaggcagaaaacgctcataatacgccgctgcttgtgctatacggttcaaatgcgggaacagctgaaggaacggcgcgtgatttagcagatattgcaatgagcaaaggatttgcaccgcaggtcgcaacgcttgattcacacgccggaaatcttccgcgcgaaggagctgtattaattgtaacggcgtcttataacggtcatccgcctgataacgcaaagcaatttgtcgactggttagaccaagcgtctgctgatgaagtaaaaggcgttcgctactccgtatttggatgcggcgataaaaactgggctgcgacgtatcaaaaagtgcctgcttttatcgatgaaacgcttgccgctaaaggggcagaaaacatcgctgaccgcggtgaagcagatgcaagcgacgactttgaaggcacatatgaagaatggagtgatcatatgtggagtgacgtagcagcctactttaacctcgacattgaaaacagtgaagataataaatctactctttcacttcaatttgtcgacagcgccgcggatatgccgcttgcgaaaatgcacggtgcgttttcaacgaacgtcgtagcaagcaaagaacttcaacagccaggcagtgcacgaagcacgcgacatcttgaaattgaacttccaaaagaagcttcttatcaagaaggagatcatttaggtgttattcctcgcaactatgaaggaatagtaaaccgtgtaacagcaaggttcggcctaagcgcatcacagcaaatccgtctggaagcagaagaagaaaaattagctcatttgccactcgctaaaacagtatccgtagaagagcttctgcaatacgtggagcttcaagatcctgttacgcgcacgcagcttcgcgcaatggctgctaaaacggtctgcccgccgcataaagtagagcttgaagccttgcttgaaaagcaagcctacaaagaacaagtgctggcaaaacgtttaacaatgcttgaactgcttgaaaaatacccggcgtgtgaaatgaaattcagcgaatttatcgcccttctgccaagcatacgcccgcgctattactcgatttcttcatcacctcgtgtcgatgaaaaacaagcaagcatcacggtcagcgttgtctcaggaccggcgtggagcggatatggagaatataaaggaattgcgtcgaactatcttgccgagctgcaagaaggagatacgattacgtgctttatttccacagatcagtcagaatttacgctgccaaaagaccctgaaacgccgcttatcatggtcggaccgggaacaggcgtcgcgccgtttagaggctttgtgcaggcgcgcaaacagctaaaagaacaaggacagtcacttggagaagcacatttatacttcggctgccgttcacctcatgaagactatctgtatcaagaagagcttgaaaacgcccaaagcgaaggcatcattacgcttcataccgctttttctcgcatgccaaatcagccgaaaacatacgttcagcacgtaatggaacaagacggcaagaaattgattgaacttcttgatcaaggagcgcacttctatatttgcggagacggaagccaaatggcacctgccgttgaagcaacgcttatgaaaagctatgctgacgttcaccaagtgagtgaagcagacgctcgcttatggctgcagcagctagaagaaaaaggccgatacgcaaaagacgtgtgggctggg

SEQ ID NO: 658 - protein, 1049 aa, synthetic construct
  REGION 1..1049: note = Variant of cytochrome P450
MTIKEMPQPKTFGELKNLPLLNTDKPVQALMRIADELGEIFKFEAPGSVTRFLSSQRLIKEACDESRFDKNLSQGLKFARDFLGDGLFTSWTHEPNWKKAHNILGPSFSQRAMKRYHAMMVDIAVQLVQKWERLNADEHIEVSEDMTRLTLDTIGLCGFNYRFNSFYRDQPHPFIVSVERALDEVMNKLQRANPDDPAYDENKRQCQEDIKVMNDYVDKIIADRKARGEQSHDLLTQMLNGKDPETGEPLDDGNIRYQIITFLIAGHETTSGLLSFALYFLVKNPHVLQKVAEEAARVLVDPVPSYKQVKQLKYVGMVLNEALRLWPTAPAFSLYAKEDTVLGGEYPLTKGDEVMVLIPQLHRDKTIWGDDFEEFRPERFENPSAIPQHAFKPFGNGQRACIGQQFALHEATLVLGMMLKHFDFEDHTNYELVIKEKLTLKPEGFVVKAKSKGIPLGGIPSPSTEQSAKKVRKKAENAHNTPLLVLYGSNAGTAEGTARDLADIAMSKGFAPQVATLDSHAGNLPREGAVLIVTASYNGHPPDNAKQFVDWLDQASADEVKGVRYSVFGCGDKNWAATYQKVPAFIDETLAAKGAENIADRGEADASDDFEGTYEEWSDHMWSDVAAYFNLDIENSEDNKSTLSLQFVDSAADMPLAKMHGAFSTNVVASKELQQPGSARSTRHLEIELPKEASYQEGDHLGVIPRNYEGIVNRVTARFGLSASQQIRLEAEEEKLAHLPLAKTVSVEELLQYVELQDPVTRTQLRAMAAKTVCPPHKVELEALLEKQAYKEQVLAKRLTMLELLEKYPACEMKFSEFIALLPSIRPRYYSISSSPRVDEKQASITVSVVSGPAWSGYGEYKGIASNYLAELQEGDTITCFISTDQSEFTLPKDPETPLIMVGPGTGVAPFRGFVQARKQLKEQGQSLGEAHLYFGCRSPHEDYLYQEELENAQSEGIITLHTAFSRMPNQPKTYVQHVMEQDGKKLIELLDQGAHFYICGDGSQMAPAVEATLMKSYADVHQVSEADARLWLQQLEEKGRYAKDVWAG

SEQ ID NO: 659 - DNA, 3147 bp, synthetic construct
  misc_feature 1..3147: note = Variant of cytochrome P450
  source 1..3147: mol_type = other DNA
atgacaattaaggaaatgcctcagcctaagacgtttggagaacttaaaaatttaccgttattaaacacagataaaccggttcaagctttgatgcgtattgcggatgaattaggagaaatctttaaattcgaggcgcctggtagcgtaacgcgctttttatcaagtcagcgtctaattaaagaagcatgcgatgaatcacgctttgataaaaacttaagtcaaggccttaaatttgcacgtgattttcttggagacgggttatttacaagctggacgcatgaaccgaattggaaaaaagcgcataatatcttaggcccaagctttagtcagcgtgcaatgaaacgttatcatgcgatgatggtcgatatcgccgtgcagcttgttcaaaagtgggagcgtctaaatgcagatgagcatattgaagtatcggaagacatgacacgtttaacgctggatacaattggtctttgcggcttcaactatcgctttaacagcttttaccgagatcagcctcatccatttattgtgagtgttgagggtctgctggatgaagtaatgaacaagctgcagcgagcaaatccagacgacccagcttatgatgaaaacaagcgccagtgtcaagaagatatcaaggtgatgaacgactatgtcgataaaattattgcagatcgcaaagcaaggggtgaacaaagccatgatttattaacgcagatgctaaacggaaaagatccagaaacgggtgagccgcttgatgacgggaacattcgttatcaaattattacattcttaattgcgggacacgaaacaacaagtggtcttttatcatttgcgctgtatttcttagtgaaaaatccacatgtattacaaaaagtagcagaagaagcagcacgagttctagtagatcctgttccaagctacaaacaagtcaaacagcttaaatatgtcggcatggtcttaaacgaagcgctgcgcttatggccaactgctcctgcgttttccctatatgcaaaagaagatacggtgcttggaggagaatatcctttaaccaaaggcgacgaagtaatggttctgattcctcagcttcaccgtgataaaacaatttggggagacgatgtggaggagttccgtccagagcgttttgaaaatccaagtgcgattccgcagcatgcgtttaaaccgtttggaaacggtcagcgtgcgtgtatcggtcagcagttcgctcttcatgaagcaacgctggtacttggtatgatgctaaaacactttgactttgaagatcatacaaactacgagctcgttattaaagaaaagttaacgttaaaacctgaaggctttgtggtaaaagcaaaatcgaaaggcattccgcttggcggtattccttcacctagcactgaacagtctgctaaaaaagtacgcaaaaaggcagaaaacgctcataatacgccgctgcttgtgctatacggttcaaatgcgggaacagctgaaggaacggcgcgtgatttagcagatattgcaatgagcaaaggatttgcaccgcaggtcgcaacgcttgattcacacgccggaaatcttccgcgcgaaggagctgtattaattgtaacggcgtcttataacggtcatccgcctgataacgcaaagcaatttgtcgactggttagaccaagcgtctgctgatgaagtaaaaggcgttcgctactccgtatttggatgcggcgataaaaactgggctgcgacgtatcaaaaagtgcctgcttttatcgatgaaacgcttgccgctaaaggggcagaaaacatcgctgaccgcggtgaagcagatgcaagcgacgactttgaaggcacatatgaagaatggagtgatcatatgtggagtgacgtagcagcctactttaacctcgacattgaaaacagtgaagataataaatctactctttcacttcaatttgtcgacagcgccgcggatatgccgcttgcgaaaatgcacggtgcgttttcaacgaacgtcgtagcaagcaaagaacttcaacagccaggcagtgcacgaagcacgcgacatcttgaaattgaacttccaaaagaagcttcttatcaagaaggagatcatttaggtgttattcctcgcaactatgaaggaatagtaaaccgtgtaacagcaaggttcggcctaagcgcatcacagcaaatccgtctggaagcagaagaagaaaaattagctcatttgccactcgctaaaacagtatccgtagaagagcttctgcaatacgtggagcttcaagatcctgttacgcgcacgcagcttcgcgcaatggctgctaaaacggtctgcccgccgcataaagtagagcttgaagccttgcttgaaaagcaagcctacaaagaacaagtgctggcaaaacgtttaacaatgcttgaactgcttgaaaaatacccggcgtgtgaaatgaaattcagcgaatttatcgcccttctgccaagcatacgcccgcgctattactcgatttcttcatcacctcgtgtcgatgaaaaacaagcaagcatcacggtcagcgttgtctcaggaccggcgtggagcggatatggagaatataaaggaattgcgtcgaactatcttgccgagctgcaagaaggagatacgattacgtgctttatttccacagatcagtcagaatttacgctgccaaaagaccctgaaacgccgcttatcatggtcggaccgggaacaggcgtcgcgccgtttagaggctttgtgcaggcgcgcaaacagctaaaagaacaaggacagtcacttggagaagcacatttatacttcggctgccgttcacctcatgaagactatctgtatcaagaagagcttgaaaacgcccaaagcgaaggcatcattacgcttcataccgctttttctcgcatgccaaatcagccgaaaacatacgttcagcacgtaatggaacaagacggcaagaaattgattgaacttcttgatcaaggagcgcacttctatatttgcggagacggaagccaaatggcacctgccgttgaagcaacgcttatgaaaagctatgctgacgttcaccaagtgagtgaagcagacgctcgcttatggctgcagcagctagaagaaaaaggccgatacgcaaaagacgtgtgggctggg

SEQ ID NO: 660 - protein, 1049 aa, synthetic construct
  REGION 1..1049: note = Variant of cytochrome P450
MTIKEMPQPKTFGELKNLPLLNTDKPVQALMRIADELGEIFKFEAPGSVTRFLSSQRLIKEACDESRFDKNLSQGLKFARDFLGDGLFTSWTHEPNWKKAHNILGPSFSQRAMKRYHAMMVDIAVQLVQKWERLNADEHIEVSEDMTRLTLDTIGLCGFNYRFNSFYRDQPHPFIVSVEGLLDEVMNKLQRANPDDPAYDENKRQCQEDIKVMNDYVDKIIADRKARGEQSHDLLTQMLNGKDPETGEPLDDGNIRYQIITFLIAGHETTSGLLSFALYFLVKNPHVLQKVAEEAARVLVDPVPSYKQVKQLKYVGMVLNEALRLWPTAPAFSLYAKEDTVLGGEYPLTKGDEVMVLIPQLHRDKTIWGDDVEEFRPERFENPSAIPQHAFKPFGNGQRACIGQQFALHEATLVLGMMLKHFDFEDHTNYELVIKEKLTLKPEGFVVKAKSKGIPLGGIPSPSTEQSAKKVRKKAENAHNTPLLVLYGSNAGTAEGTARDLADIAMSKGFAPQVATLDSHAGNLPREGAVLIVTASYNGHPPDNAKQFVDWLDQASADEVKGVRYSVFGCGDKNWAATYQKVPAFIDETLAAKGAENIADRGEADASDDFEGTYEEWSDHMWSDVAAYFNLDIENSEDNKSTLSLQFVDSAADMPLAKMHGAFSTNVVASKELQQPGSARSTRHLEIELPKEASYQEGDHLGVIPRNYEGIVNRVTARFGLSASQQIRLEAEEEKLAHLPLAKTVSVEELLQYVELQDPVTRTQLRAMAAKTVCPPHKVELEALLEKQAYKEQVLAKRLTMLELLEKYPACEMKFSEFIALLPSIRPRYYSISSSPRVDEKQASITVSVVSGPAWSGYGEYKGIASNYLAELQEGDTITCFISTDQSEFTLPKDPETPLIMVGPGTGVAPFRGFVQARKQLKEQGQSLGEAHLYFGCRSPHEDYLYQEELENAQSEGIITLHTAFSRMPNQPKTYVQHVMEQDGKKLIELLDQGAHFYICGDGSQMAPAVEATLMKSYADVHQVSEADARLWLQQLEEKGRYAKDVWAG

SEQ ID NO: 661 - DNA, 3147 bp, synthetic construct
  misc_feature 1..3147: note = Variant of cytochrome P450
  source 1..3147: mol_type = other DNA
atgacaattaaggaaatgcctcagcctaagacgtttggagaacttaaaaatttaccgttattaaacacagataaaccggttcaagctttgatgcgtattgcggatgaattaggagaaatctttaaattcgaggcgcctggtagcgtaacgcgctttttatcaagtcagcgtctaattaaagaagcatgcgatgaatcacgctttgataaaaacttaagtcaaggccttaaatttgcacgtgattttcttggagacgggttatttacaagctggacgcatgaaccgaattggaaaaaagcgcataatatcttaggcccaagctttagtcagcgtgcaatgaaacgttatcatgcgatgatggtcgatatcgccgtgcagcttgttcaaaagtgggagcgtctaaatgcagatgagcatattgaagtatcggaagacatgacacgtttaacgctggatacaattggtctttgcggcttcaactatcgctttaacagcttttaccgagatcagcctcatccatttattgtgagtgttgagcgtgcactggatgaagtaatgaacaagctgcagcgagcaaatccagacgacccagcttatgatgaaaacaagcgccagtgtcaagaagatatcaaggtgatgaacgactatgtcgataaaattattgcagatcgcaaagcaaggggtgaacaaagccatgatttattaacgcagatgctaaacggaaaagatccagaaacgggtgagccgcttgatgacgggaacattcgttatcaaattattacattcttaattgcgggacacgaaacaacaagtggtcttttatcatttgcgctgtatttcttagtgaaaaatccacatgtattacaaaaagtagcagaagaagcagcacgagttctagtagatcctgttccaagctacaaacaagtcaaacagcttaaatatgtcggcatggtcttaaacgaagcgctgcgcttatggccaactgctcctgcgttttccctatatgcaaaagaagatacggtgcttggaggagaatatcctttaaccaaaggcgacgaagtaatggttctgattcctcagcttcaccgtgataaaacaatttggggagacgatgtggaggagttccgtccagagcgttttgaaaatccaagtgcgattccgcagcatgcgtttaaaccgtttggaaacggtcagcgtgcgtgtatcggtcagcagttcgctcttcatgaagcaacgctggtacttggtatgatgctaaaacactttgactttgaagatcatacaaactacgagctcgttattaaagaaaagttaacgttaaaacctgaaggctttgtggtaaaagcaaaatcgaaaggcattccgcttggcggtattccttcacctagcactgaacagtctgctaaaaaagtacgcaaaaaggcagaaaacgctcataatacgccgctgcttgtgctatacggttcaaatgcgggaacagctgaaggaacggcgcgtgatttagcagatattgcaatgagcaaaggatttgcaccgcaggtcgcaacgcttgattcacacgccggaaatcttccgcgcgaaggagctgtattaattgtaacggcgtcttataacggtcatccgcctgataacgcaaagagttttgtcgactggttagaccaagcgtctgctgatgaagtaaaaggcgttcgctactccgtatttggatgcggcgataaaaactgggctgcgacgtatcaaaaagtgcctgcttttatcgatgaaacgcttgccgctaaaggggcagaaaacatcgctgaccgcggtgaagcagatgcaagcgacgactttgaaggcacatatgaagaatggagtgatcatatgtggagtgacgtagcagcctactttaacctcgacattgaaaacagtgaagataataaatctactctttcacttcaatttgtcgacagcgccgcggatatgccgcttgcgaaaatgcacggtgcgttttcaacgaacgtcgtagcaagcaaagaacttcaacagccaggcagtgcacgaagcacgcgacatcttgaaattgaacttccaaaagaagcttcttatcaagaaggagatcatttaggtgttattcctcgcaactatgaaggaatagtaaaccgtgtaacagcaaggttcggcctaagcgcatcacagcaaatccgtctggaagcagaagaagaaaaattagctcatttgccactcgctaaaacagtatccgtagaagagcttctgcaatacgtggagcttcaagatcctgttacgcgcacgcagcttcgcgcaatggctgctaaaacggtctgcccgccgcataaagtagagcttgaagccttgcttgaaaagcaagcctacaaagaacaagtgctggcaaaacgtttaacaatgcttgaactgcttgaaaaatacccggcgtgtgaaatgaaattcagcgaatttatcgcccttctgccaagcatacgcccgcgctattactcgatttcttcatcacctcgtgtcgatgaaaaacaagcaagcatcacggtcagcgttgtctcaggaccggcgtggagcggatatggagaatataaaggaattgcgtcgaactatcttgccgagctgcaagaaggagatacgattacgtgctttatttccacagatcagtcagaatttacgctgccaaaagaccctgaaacgccgcttatcatggtcggaccgggaacaggcgtcgcgccgtttagaggctttgtgcaggcgcgcaaacagctaaaagaacaaggacagtcacttggagaagcacatttatacttcggctgccgttcacctcatgaagactatctgtatcaagaagagcttgaaaacgcccaaagcgaaggcatcattacgcttcataccgctttttctcgcatgccaaatcagccgaaaacatacgttcagcacgtaatggaacaagacggcaagaaattgattgaacttcttgatcaaggagcgcacttctatatttgcggagacggaagccaaatggcacctgccgttgaagcaacgcttatgaaaagctatgctgacgttcaccaagtgagtgaagcagacgctcgcttatggctgcagcagctagaagaaaaaggccgatacgcaaaagacgtgtgggctggg

SEQ ID NO: 662 - protein, 1049 aa, synthetic construct
  REGION 1..1049: note = Variant of cytochrome P450
MTIKEMPQPKTFGELKNLPLLNTDKPVQALMRIADELGEIFKFEAPGSVTRFLSSQRLIKEACDESRFDKNLSQGLKFARDFLGDGLFTSWTHEPNWKKAHNILGPSFSQRAMKRYHAMMVDIAVQLVQKWERLNADEHIEVSEDMTRLTLDTIGLCGFNYRFNSFYRDQPHPFIVSVERALDEVMNKLQRANPDDPAYDENKRQCQEDIKVMNDYVDKIIADRKARGEQSHDLLTQMLNGKDPETGEPLDDGNIRYQIITFLIAGHETTSGLLSFALYFLVKNPHVLQKVAEEAARVLVDPVPSYKQVKQLKYVGMVLNEALRLWPTAPAFSLYAKEDTVLGGEYPLTKGDEVMVLIPQLHRDKTIWGDDVEEFRPERFENPSAIPQHAFKPFGNGQRACIGQQFALHEATLVLGMMLKHFDFEDHTNYELVIKEKLTLKPEGFVVKAKSKGIPLGGIPSPSTEQSAKKVRKKAENAHNTPLLVLYGSNAGTAEGTARDLADIAMSKGFAPQVATLDSHAGNLPREGAVLIVTASYNGHPPDNAKSFVDWLDQASADEVKGVRYSVFGCGDKNWAATYQKVPAFIDETLAAKGAENIADRGEADASDDFEGTYEEWSDHMWSDVAAYFNLDIENSEDNKSTLSLQFVDSAADMPLAKMHGAFSTNVVASKELQQPGSARSTRHLEIELPKEASYQEGDHLGVIPRNYEGIVNRVTARFGLSASQQIRLEAEEEKLAHLPLAKTVSVEELLQYVELQDPVTRTQLRAMAAKTVCPPHKVELEALLEKQAYKEQVLAKRLTMLELLEKYPACEMKFSEFIALLPSIRPRYYSISSSPRVDEKQASITVSVVSGPAWSGYGEYKGIASNYLAELQEGDTITCFISTDQSEFTLPKDPETPLIMVGPGTGVAPFRGFVQARKQLKEQGQSLGEAHLYFGCRSPHEDYLYQEELENAQSEGIITLHTAFSRMPNQPKTYVQHVMEQDGKKLIELLDQGAHFYICGDGSQMAPAVEATLMKSYADVHQVSEADARLWLQQLEEKGRYAKDVWAG

SEQ ID NO: 663 - DNA, 3147 bp, synthetic construct
  misc_feature 1..3147: note = Variant of cytochrome P450
  source 1..3147: mol_type = other DNA
atgacaattaaggaaatgcctcagcctaagacgtttggagaacttaaaaatttaccgttattaaacacagataaaccggttcaagctttgatgcgtattgcggatgaattaggagaaatctttaaattcgaggcgcctggtagcgtaacgcgctttttatcaagtcagcgtctaattaaagaagcatgcgatgaatcacgctttgataaaaacttaagtcaaggccttaaatttgcacgtgattttcttggagacgggttatttacaagctggacgcatgaaccgaattggaaaaaagcgcataatatcttaggcccaagctttagtcagcgtgcaatgaaacgttatcatgcgatgatggtcgatatcgccgtgcagcttgttcaaaagtgggagcgtctaaatgcagatgagcatattgaagtatcggaagacatgacacgtttaacgctggatacaattggtctttgcggcttcaactatcgctttaacagcttttaccgagatcagcctcatccatttattgtgagtgttgagcgtgcactggatgaagtaatgaacaagctgcagcgagcaaatccagacgacccagcttatgatgaaaacaagcgccagtgtcaagaagatatcaaggtgatgaacgactatgtcgataaaattattgcagatcgcaaagcaaggggtgaacaaagccatgatttattaacgcagatgctaaacggaaaagatccaaggacgggtgagccgcttgatgacgggaacattcgttatcaaattattacattcttaattgcgggacacgaaacaacaagtggtcttttatcatttgcgctgtatttcttagtgaaaaatccacatgtattacaaaaagtagcagaagaagcagcacgagttctagtagatcctgttccaagctacaaacaagtcaaacagcttaaatatgtcggcatggtcttaaacgaagcgctgcgcttatggccaactgctcctgcgttttccctatatgcaaaagaagatacggtgcttggaggagaatatcctttaaccaaaggcgacgaagtaatggttctgattcctcagcttcaccgtgataaaacaatttggggagacgatgtggaggagttccgtccagagcgttttgaaaatccaagtgcgattccgcagcatgcgtttaaaccgtttggaaacggtcagcgtgcgtgtatcggtcagcagttcgctcttcatgaagcaacgctggtacttggtatgatgctaaaacactttgactttgaagatcatacaaactacgagctcgttattaaagaaaagttaacgttaaaacctgaaggctttgtggtaaaagcaaaatcgaaaggcattccgcttggcggtattccttcacctagcactgaacagtctgctaaaaaagtacgcaaaaaggcagaaaacgctcataatacgccgctgcttgtgctatacggttcaaatgcgggaacagctgaaggaacggcgcgtgatttagcagatattgcaatgagcaaaggatttgcaccgcaggtcgcaacgcttgattcacacgccggaaatcttccgcgcgaaggagctgtattaattgtaacggcgtcttataacggtcatccgcctgataacgcaaagcaatttgtcgactggttagaccaagcgtctgctgatgaagtaaaaggcgttcgctactccgtatttggatgcggcgataaaaactgggctgcgacgtatcaaaaagtgcctgcttttatcgatgaaacgcttgccgctaaaggggcagaaaacatcgctgaccgcggtgaagcagatgcaagcgacgactttgaaggcacatatgaagaatggagtgatcatatgtggagtgacgtagcagcctactttaacctcgacattgaaaacagtgaagataataaatctactctttcacttcaatttgtcgacagcgccgcggatatgccgcttgcgaaaatgcacggtgcgttttcaacgaacgtcgtagcaagcaaagaacttcaacagccaggcagtgcacgaagcacgcgacatcttgaaattgaacttccaaaagaagcttcttatcaagaaggagatcatttaggtgttattcctcgcaactatgaaggaatagtaaaccgtgtaacagcaaggttcggcctaagcgcatcacagcaaatccgtctggaagcagaagaagaaaaattagctcatttgccactcgctaaaacagtatccgtagaagagcttctgcaatacgtggagcttcaagatcctgttacgcgcacgcagcttcgcgcaatggctgctaaaacggtctgcccgccgcataaagtagagcttgaagccttgcttgaaaagcaagcctacaaagaacaagtgctggcaaaacgtttaacaatgcttgaactgcttgaaaaatacccggcgtgtgaaatgaaattcagcgaatttatcgcccttctgccaagcatacgcccgcgctattactcgatttcttcatcacctcgtgtcgatgaaaaacaagcaagcatcacggtcagcgttgtctcaggaccggcgtggagcggatatggagaatataaaggaattgcgtcgaactatcttgccgagctgcaagaaggagatacgattacgtgctttatttccacagatcagtcagaatttacgctgccaaaagaccctgaaacgccgcttatcatggtcggaccgggaacaggcgtcgcgccgtttagaggctttgtgcaggcgcgcaaacagctaaaagaacaaggacagtcacttggagaagcacatttatacttcggctgccgttcacctcatgaagactatctgtatcaagaagagcttgaaaacgcccaaagcgaaggcatcattacgcttcataccgctttttctcgcatgccaaatcagccgaaaacatacgttcagcacgtaatggaacaagacggcaagaaattgattgaacttcttgatcaaggagcgcacttctatatttgcggagacggaagccaaatggcacctgccgttgaagcaacgcttatgaaaagctatgctgacgttcaccaagtgagtgaagcagacgctcgcttatggctgcagcagctagaagaaaaaggccgatacgcaaaagacgtgtgggctggg

SEQ ID NO: 664 - protein, 1049 aa, synthetic construct
  REGION 1..1049: note = Variant of cytochrome P450
MTIKEMPQPKTFGELKNLPLLNTDKPVQALMRIADELGEIFKFEAPGSVTRFLSSQRLIKEACDESRFDKNLSQGLKFARDFLGDGLFTSWTHEPNWKKAHNILGPSFSQRAMKRYHAMMVDIAVQLVQKWERLNADEHIEVSEDMTRLTLDTIGLCGFNYRFNSFYRDQPHPFIVSVERALDEVMNKLQRANPDDPAYDENKRQCQEDIKVMNDYVDKIIADRKARGEQSHDLLTQMLNGKDPRTGEPLDDGNIRYQIITFLIAGHETTSGLLSFALYFLVKNPHVLQKVAEEAARVLVDPVPSYKQVKQLKYVGMVLNEALRLWPTAPAFSLYAKEDTVLGGEYPLTKGDEVMVLIPQLHRDKTIWGDDVEEFRPERFENPSAIPQHAFKPFGNGQRACIGQQFALHEATLVLGMMLKHFDFEDHTNYELVIKEKLTLKPEGFVVKAKSKGIPLGGIPSPSTEQSAKKVRKKAENAHNTPLLVLYGSNAGTAEGTARDLADIAMSKGFAPQVATLDSHAGNLPREGAVLIVTASYNGHPPDNAKQFVDWLDQASADEVKGVRYSVFGCGDKNWAATYQKVPAFIDETLAAKGAENIADRGEADASDDFEGTYEEWSDHMWSDVAAYFNLDIENSEDNKSTLSLQFVDSAADMPLAKMHGAFSTNVVASKELQQPGSARSTRHLEIELPKEASYQEGDHLGVIPRNYEGIVNRVTARFGLSASQQIRLEAEEEKLAHLPLAKTVSVEELLQYVELQDPVTRTQLRAMAAKTVCPPHKVELEALLEKQAYKEQVLAKRLTMLELLEKYPACEMKFSEFIALLPSIRPRYYSISSSPRVDEKQASITVSVVSGPAWSGYGEYKGIASNYLAELQEGDTITCFISTDQSEFTLPKDPETPLIMVGPGTGVAPFRGFVQARKQLKEQGQSLGEAHLYFGCRSPHEDYLYQEELENAQSEGIITLHTAFSRMPNQPKTYVQHVMEQDGKKLIELLDQGAHFYICGDGSQMAPAVEATLMKSYADVHQVSEADARLWLQQLEEKGRYAKDVWAG

SEQ ID NO: 665 - DNA, 3147 bp, synthetic construct
  misc_feature 1..3147: note = Variant of cytochrome P450
  source 1..3147: mol_type = other DNA
atgacaattaaggaaatgcctcagcctaagacgtttggagaacttaaaaatttaccgttattaaacacagataaaccggttcaagctttgatgcgtattgcggatgaattaggagaaatctttaaattcgaggcgcctggtagcgtaacgcgctttttatcaagtcagcgtctaattaaagaagcatgcgatgaatcacgctttgataaaaacttaagtcaaggccttaaatttgcacgtgattttcttggagacgggttatttacaagctggacgcatgaaccgaattggaaaaaagcgcataatatcttaggcccaagctttagtcagcgtgcaatgaaacgttatcatgcgatgatggtcgatatcgccgtgcagcttgttcaaaagtgggagcgtctaaatgcagatgagcatattgaagtatcggaagacatgacacgtttaacgctggatacaattggtctttgcggcttcaactatcgctttaacagcttttaccgagatcagcctcatccatttattgtgagtgttgagcgtgcactggatgaagtaatgaacaagctgcagcgagcaaatccagacgacccagcttatgatgaaaacaagcgccagtgtcaagaagatatcaaggtgatgaacgactatgtcgataaaattattgcagatcgcaaagcaaggggtgaacaaagccatgatttattaacgcagatgctaaacggaaaagatccagaaacgggtgagccgcttgatgacgggaacattcgttatcaaattattacattcttaattgcgggacacgaaacaacaagtggtcttttatcatttgcgctgtatttcttagtgaaaaatccacatgtattacaaaaagtagcagaagaagcagcacgagttctagtagatcctgttccaagctacaaacaagtcaaacagcttaaatatgtcggcatggtcttaaacgaagcgctgcgcttatggccaactgctcctgcgttttccctatatgcaaaagaagatacggtgcttggaggagaatatcctttaaccaaaggcgacgaagtaatggttctgattcctcagcttcaccgtgataaaacaatttggggagacgatgtggaggagttccgtccagagcgttttgaaaatccaagtgcgattccgcagcatgcgtttaaaccgtttggaaacggtcagcgtgcgtgtatcggtcagcagttcgctcttcatgaagcaacgctggtacttggtatgatgctaaaacactttgactttgaagatcatacaaactacgagctcgttattaaagaaaagttaacgttaaaacctgaaggctttgtggtaaaagcaaaatcgaaaggcattccgcttggcggtattccttcacctagcactgaacagtctgctaaaaaagtacgcaaaaaggcagaaaacgctcataatacgccgatgcttgtgctatacggttcaaatgcgggaacagctgaaggaacggcgcgtgatttagcagatattgcaatgagcaaaggatttgcaccgcaggtcgcaacgcttgattcacacgccggaaatcttccgcgcgaaggagctgtattaattgtaacggcgtcttataacggtcatccgcctgataacgcaaagcaatttgtcgactggttagaccaagcgtctgctgatgaagtaaaaggcgttcgctactccgtatttggatgcggcgataaaaactgggctgcgacgtatcaaaaagtgcctgcttttatcgatgaaacgcttgccgctaaaggggcagaaaacatcgctgaccgcggtgaagcagatgcaagcgacgactttgaaggcacatatgaagaatggagtgatcatatgtggagtgacgtagcagcctactttaacctcgacattgaaaacagtgaagataataaatctactctttcacttcaatttgtcgacagcgccgcggatatgccgcttgcgaaaatgcacggtgcgttttcaacgaacgtcgtagcaagcaaagaacttcaacagccaggcagtgcacgaagcacgcgacatcttgaaattgaacttccaaaagaagcttcttatcaagaaggagatcatttaggtgttattcctcgcaactatgaaggaatagtaaaccgtgtaacagcaaggttcggcctaagcgcatcacagcaaatccgtctggaagcagaagaagaaaaattagctcatttgccactcgctaaaacagtatccgtagaagagcttctgcaatacgtggagcttcaagatcctgttacgcgcacgcagcttcgcgcaatggctgctaaaacggtctgcccgccgcataaagtagagcttgaagccttgcttgaaaagcaagcctacaaagaacaagtgctggcaaaacgtttaacaatgcttgaactgcttgaaaaatacccggcgtgtgaaatgaaattcagcgaatttatcgcccttctgccaagcatacgcccgcgctattactcgatttcttcatcacctcgtgtcgatgaaaaacaagcaagcatcacggtcagcgttgtctcaggaccggcgtggagcggatatggagaatataaaggaattgcgtcgaactatcttgccgagctgcaagaaggagatacgattacgtgctttatttccacagatcagtcagaatttacgctgccaaaagaccctgaaacgccgcttatcatggtcggaccgggaacaggcgtcgcgccgtttagaggctttgtgcaggcgcgcaaacagctaaaagaacaaggacagtcacttggagaagcacatttatacttcggctgccgttcacctcatgaagactatctgtatcaagaagagcttgaaaacgcccaaagcgaaggcatcattacgcttcataccgctttttctcgcatgccaaatcagccgaaaacatacgttcagcacgtaatggaacaagacggcaagaaattgattgaacttcttgatcaaggagcgcacttctatatttgcggagacggaagccaaatggcacctgccgttgaagcaacgcttatgaaaagctatgctgacgttcaccaagtgagtgaagcagacgctcgcttatggctgcagcagctagaagaaaaaggccgatacgcaaaagacgtgtgggctggg

SEQ ID NO: 666 - protein, 1049 aa, synthetic construct
  REGION 1..1049: note = Variant of cytochrome P450
MTIKEMPQPKTFGELKNLPLLNTDKPVQALMRIADELGEIFKFEAPGSVTRFLSSQRLIKEACDESRFDKNLSQGLKFARDFLGDGLFTSWTHEPNWKKAHNILGPSFSQRAMKRYHAMMVDIAVQLVQKWERLNADEHIEVSEDMTRLTLDTIGLCGFNYRFNSFYRDQPHPFIVSVERALDEVMNKLQRANPDDPAYDENKRQCQEDIKVMNDYVDKIIADRKARGEQSHDLLTQMLNGKDPETGEPLDDGNIRYQIITFLIAGHETTSGLLSFALYFLVKNPHVLQKVAEEAARVLVDPVPSYKQVKQLKYVGMVLNEALRLWPTAPAFSLYAKEDTVLGGEYPLTKGDEVMVLIPQLHRDKTIWGDDVEEFRPERFENPSAIPQHAFKPFGNGQRACIGQQFALHEATLVLGMMLKHFDFEDHTNYELVIKEKLTLKPEGFVVKAKSKGIPLGGIPSPSTEQSAKKVRKKAENAHNTPMLVLYGSNAGTAEGTARDLADIAMSKGFAPQVATLDSHAGNLPREGAVLIVTASYNGHPPDNAKQFVDWLDQASADEVKGVRYSVFGCGDKNWAATYQKVPAFIDETLAAKGAENIADRGEADASDDFEGTYEEWSDHMWSDVAAYFNLDIENSEDNKSTLSLQFVDSAADMPLAKMHGAFSTNVVASKELQQPGSARSTRHLEIELPKEASYQEGDHLGVIPRNYEGIVNRVTARFGLSASQQIRLEAEEEKLAHLPLAKTVSVEELLQYVELQDPVTRTQLRAMAAKTVCPPHKVELEALLEKQAYKEQVLAKRLTMLELLEKYPACEMKFSEFIALLPSIRPRYYSISSSPRVDEKQASITVSVVSGPAWSGYGEYKGIASNYLAELQEGDTITCFISTDQSEFTLPKDPETPLIMVGPGTGVAPFRGFVQARKQLKEQGQSLGEAHLYFGCRSPHEDYLYQEELENAQSEGIITLHTAFSRMPNQPKTYVQHVMEQDGKKLIELLDQGAHFYICGDGSQMAPAVEATLMKSYADVHQVSEADARLWLQQLEEKGRYAKDVWAG

SEQ ID NO: 667 - DNA, 3147 bp, synthetic construct
  misc_feature 1..3147: note = Variant of cytochrome P450
  source 1..3147: mol_type = other DNA
atgacaattaaggaaatgcctcagcctaagacgtttggagaacttaaaaatttaccgttattaaacacagataaaccggttcaagctttgatgcgtattgcggatgaattaggagaaatctttaaattcgaggcgcctggtagcgtaacgcgctttttatcaagtcagcgtctaattaaagaagcatgcgatgaatcacgctttgataaaaacttaagtcaaggccttaaatttgcacgtgattttcttggagacgggttatttacaagctggacgcatgaaccgaattggaaaaaagcgcataatatcttaggcccaagctttagtcagcgtgcaatgaaacgttatcatgcgatgatggtcgatatcgccgtgcagcttgttcaaaagtgggagcgtctaaatgcagatgagcatattgaagtatcggaagacatgacacgtttaacgctggatacaattggtctttgcggcttcaactatcgctttaacagcttttaccgagatcagcctcatccatttattgtgagtgttgagcgtgcactggatgaagtaatgaacaagctgcagcgagcaaatccagacgacccagcttatgatgaaaacaagcgccagtgtcaagaagatatcaaggtgatgaacgactatgtcgataaaattattgcagatcgcaaagcaaggggtgaacaaagccatgatttattaacgcagatgctaaacggaaaagatccagaaacgggtgagccgcttgatgacgggaacattcgttatcaaattattacattcttaattgcgggacacgaaacaacaagtggtcttttatcatttgcgctgtatttcttagtgaaaaatccacatgtattacaaaaagtagcagaagaagcagcacgagttctagtagatcctgttccaagctacaaacaagtcaaacagcttaaatatgtcggcatggtcttaaacgaagcgctgcgcttatggccaactgctcctgcgttttccctatatgcaaaagaagatacggtgcttggaggagaatatcctttaaccaaaggcgacgaagtaatggttctgattcctcagcttcaccgtgataaaacaatttggggagacgatgtggaggagttccgtccagagcgttttgaaaatccaagtgcgattccgcagcatgcgtttaaaccgtttggaaacggtcagcgtgcgtgtatcggtcagcagttcgctcttcatgaagcaacgctggtacttggtatgatgctaaaacactttgactttgaagatcatacaaactacgagctcgttattaaagaaaagttaacgttaaaacctgaaggctttgtggtaaaagcaaaatcgaaaggcattccgcttggcggtattccttcacctagcactgaacagtctgctaaaaaagtacgcaaaaaggcagaaaacgctcataatacgccgctgcttgtgctatacggttcaaatgcgggaacagctgaaggaacggcgcgtgatttagcagatattgcaatgagcaaaggatttgcaccgcaggtcgcaacgcttgattcacacgcccataatcttccgcgcgaaggagctgtattaattgtaacggcgtcttataacggtcatccgcctgataacgcaaagcaatttgtcgactggttagaccaagcgtctgctgatgaagtaaaaggcgttcgctactccgtatttggatgcggcgataaaaactgggctgcgacgtatcaaaaagtgcctgcttttatcgatgaaacgcttgccgctaaaggggcagaaaacatcgctgaccgcggtgaagcagatgcaagcgacgactttgaaggcacatatgaagaatggagtgatcatatgtggagtgacgtagcagcctactttaacctcgacattgaaaacagtgaagataataaatctactctttcacttcaatttgtcgacagcgccgcggatatgccgcttgcgaaaatgcacggtgcgttttcaacgaacgtcgtagcaagcaaagaacttcaacagccaggcagtgcacgaagcacgcgacatcttgaaattgaacttccaaaagaagcttcttatcaagaaggagatcatttaggtgttattcctcgcaactatgaaggaatagtaaaccgtgtaacagcaaggttcggcctaagcgcatcacagcaaatccgtctggaagcagaagaagaaaaattagctcatttgccactcgctaaaacagtatccgtagaagagcttctgcaatacgtggagcttcaagatcctgttacgcgcacgcagcttcgcgcaatggctgctaaaacggtctgcccgccgcataaagtagagcttgaagccttgcttgaaaagcaagcctacaaagaacaagtgctggcaaaacgtttaacaatgcttgaactgcttgaaaaatacccggcgtgtgaaatgaaattcagcgaatttatcgcccttctgccaagcatacgcccgcgctattactcgatttcttcatcacctcgtgtcgatgaaaaacaagcaagcatcacggtcagcgttgtctcaggaccggcgtggagcggatatggagaatataaaggaattgcgtcgaactatcttgccgagctgcaagaaggagatacgattacgtgctttatttccacagatcagtcagaatttacgctgccaaaagaccctgaaacgccgcttatcatggtcggaccgggaacaggcgtcgcgccgtttagaggctttgtgcaggcgcgcaaacagctaaaagaacaaggacagtcacttggagaagcacatttatacttcggctgccgttcacctcatgaagactatctgtatcaagaagagcttgaaaacgcccaaagcgaaggcatcattacgcttcataccgctttttctcgcatgccaaatcagccgaaaacatacgttcagcacgtaatggaacaagacggcaagaaattgattgaacttcttgatcaaggagcgcacttctatatttgcggagacggaagccaaatggcacctgccgttgaagcaacgcttatgaaaagctatgctgacgttcaccaagtgagtgaagcagacgctcgcttatggctgcagcagctagaagaaaaaggccgatacgcaaaagacgtgtgggctggg

SEQ ID NO: 668 - protein, 1049 aa, synthetic construct
  REGION 1..1049: note = Variant of cytochrome P450
MTIKEMPQPKTFGELKNLPLLNTDKPVQALMRIADELGEIFKFEAPGSVTRFLSSQRLIKEACDESRFDKNLSQGLKFARDFLGDGLFTSWTHEPNWKKAHNILGPSFSQRAMKRYHAMMVDIAVQLVQKWERLNADEHIEVSEDMTRLTLDTIGLCGFNYRFNSFYRDQPHPFIVSVERALDEVMNKLQRANPDDPAYDENKRQCQEDIKVMNDYVDKIIADRKARGEQSHDLLTQMLNGKDPETGEPLDDGNIRYQIITFLIAGHETTSGLLSFALYFLVKNPHVLQKVAEEAARVLVDPVPSYKQVKQLKYVGMVLNEALRLWPTAPAFSLYAKEDTVLGGEYPLTKGDEVMVLIPQLHRDKTIWGDDVEEFRPERFENPSAIPQHAFKPFGNGQRACIGQQFALHEATLVLGMMLKHFDFEDHTNYELVIKEKLTLKPEGFVVKAKSKGIPLGGIPSPSTEQSAKKVRKKAENAHNTPLLVLYGSNAGTAEGTARDLADIAMSKGFAPQVATLDSHAHNLPREGAVLIVTASYNGHPPDNAKQFVDWLDQASADEVKGVRYSVFGCGDKNWAATYQKVPAFIDETLAAKGAENIADRGEADASDDFEGTYEEWSDHMWSDVAAYFNLDIENSEDNKSTLSLQFVDSAADMPLAKMHGAFSTNVVASKELQQPGSARSTRHLEIELPKEASYQEGDHLGVIPRNYEGIVNRVTARFGLSASQQIRLEAEEEKLAHLPLAKTVSVEELLQYVELQDPVTRTQLRAMAAKTVCPPHKVELEALLEKQAYKEQVLAKRLTMLELLEKYPACEMKFSEFIALLPSIRPRYYSISSSPRVDEKQASITVSVVSGPAWSGYGEYKGIASNYLAELQEGDTITCFISTDQSEFTLPKDPETPLIMVGPGTGVAPFRGFVQARKQLKEQGQSLGEAHLYFGCRSPHEDYLYQEELENAQSEGIITLHTAFSRMPNQPKTYVQHVMEQDGKKLIELLDQGAHFYICGDGSQMAPAVEATLMKSYADVHQVSEADARLWLQQLEEKGRYAKDVWAG

SEQ ID NO: 669 - DNA, 3147 bp, synthetic construct
  misc_feature 1..3147: note = Variant of cytochrome P450
  source 1..3147: mol_type = other DNA
atgacaattaaggaaatgcctcagcctaagacgtttggagaacttaaaaatttaccgttattaaacacagataaaccggttcaagctttgatgcgtattgcggatgaattaggagaaatctttaaattcgaggcgcctggtagcgtaacgcgctttttatcaagtcagcgtctaattaaagaagcatgcgatgaatcacgctttgataaaaacttaagtcaaggccttaaatttgcacgtgattttcttggagacgggttatttacaagctggacgcatgaaccgaattggaaaaaagcgcataatatcttaggcccaagctttagtcagcgtgcaatgaaacgttatcatgcgatgatgatggatatcgccgtgcagcttgttcaaaagtgggagcgtctaaatgcagatgagcatattgaagtatcggaagacatgacacgtttaacgctggatacaattggtctttgcggcttcaactatcgctttaacagcttttaccgagatcagcctcatccatttattgtgagtgttgagcgtgcactggatgaagtaatgaacaagctgcagcgagcaaatccagacgacccagcttatgatgaaaacaagcgccagtgtcaagaagatatcaaggtgatgaacgactatgtcgataaaattattgcagatcgcaaagcaaggggtgaacaaagccatgatttattaacgcagatgctaaacggaaaagatccagaaacgggtgagccgcttgatgacgggaacattcgttatcaaattattacattcttaattgcgggacacgaaacaacaagtggtcttttatcatttgcgctgtatttcttagtgaaaaatccacatgtattacaaaaagtagcagaagaagcagcacgagttctagtagatcctgttccaagctacaaacaagtcaaacagcttaaatatgtcggcatggtcttaaacgaagcgctgcgcttatggccaactgctcctgcgttttccctatatgcaaaagaagatacggtgcttggaggagaatatcctttaaccaaaggcgacgaagtaatggttctgattcctcagcttcaccgtgataaaacaatttggggagacgatgtggaggagttccgtccagagcgttttgaaaatccaagtgcgattccgcagcatgcgtttaaaccgtttggaaacggtcagcgtgcgtgtatcggtcagcagttcgctcttcatgaagcaacgctggtacttggtatgatgctaaaacactttgactttgaagatcatacaaactacgagctcgttattaaagaaaagttaacgttaaaacctgaaggctttgtggtaaaagcaaaatcgaaaggcattccgcttggcggtattccttcacctagcactgaacagtctgctaaaaaagtacgcaaaaaggcagaaaacgctcataatacgccgctgcttgtgctatacggttcaaatgcgggaacagctgaaggaacggcgcgtgatttagcagatattgcaatgagcaaaggatttgcaccgcaggtcgcaacgcttgattcacacgccggaaatcttccgcgcgaaggagctgtattaattgtaacggcgtcttataacggtcatccgcctgataacgcaaagcaatttgtcgactggttagaccaagcgtctgctgatgaagtaaaaggcgttcgctactccgtatttggatgcggcgataaaaactgggctgcgacgtatcaaaaagtgcctgcttttatcgatgaaacgcttgccgctaaaggggcagaaaacatcgctgaccgcggtgaagcagatgcaagcgacgactttgaaggcacatatgaagaatggagtgatcatatgtggagtgacgtagcagcctactttaacctcgacattgaaaacagtgaagataataaatctactctttcacttcaatttgtcgacagcgccgcggatatgccgcttgcgaaaatgcacggtgcgttttcaacgaacgtcgtagcaagcaaagaacttcaacagccaggcagtgcacgaagcacgcgacatcttgaaattgaacttccaaaagaagcttcttatcaagaaggagatcatttaggtgttattcctcgcaactatgaaggaatagtaaaccgtgtaacagcaaggttcggcctaagcgcatcacagcaaatccgtctggaagcagaagaagaaaaattagctcatttgccactcgctaaaacagtatccgtagaagagcttctgcaatacgtggagcttcaagatcctgttacgcgcacgcagcttcgcgcaatggctgctaaaacggtctgcccgccgcataaagtagagcttgaagccttgcttgaaaagcaagcctacaaagaacaagtgctggcaaaacgtttaacaatgcttgaactgcttgaaaaatacccggcgtgtgaaatgaaattcagcgaatttatcgcccttctgccaagcatacgcccgcgctattactcgatttcttcatcacctcgtgtcgatgaaaaacaagcaagcatcacggtcagcgttgtctcaggaccggcgtggagcggatatggagaatataaaggaattgcgtcgaactatcttgccgagctgcaagaaggagatacgattacgtgctttatttccacagatcagtcagaatttacgctgccaaaagaccctgaaacgccgcttatcatggtcggaccgggaacaggcgtcgcgccgtttagaggctttgtgcaggcgcgcaaacagctaaaagaacaaggacagtcacttggagaagcacatttatacttcggctgccgttcacctcatgaagactatctgtatcaagaagagcttgaaaacgcccaaagcgaaggcatcattacgcttcataccgctttttctcgcatgccaaatcagccgaaaacatacgttcagcacgtaatggaacaagacggcaagaaattgattgaacttcttgatcaaggagcgcacttctatatttgcggagacggaagccaaatggcacctgccgttgaagcaacgcttatgaaaagctatgctgacgttcaccaagtgagtgaagcagacgctcgcttatggctgcagcagctagaagaaaaaggccgatacgcaaaagacgtgtgggctggg

SEQ ID NO: 670 - protein, 1049 aa, synthetic construct
  REGION 1..1049: note = Variant of cytochrome P450
MTIKEMPQPKTFGELKNLPLLNTDKPVQALMRIADELGEIFKFEAPGSVTRFLSSQRLIKEACDESRFDKNLSQGLKFARDFLGDGLFTSWTHEPNWKKAHNILGPSFSQRAMKRYHAMMMDIAVQLVQKWERLNADEHIEVSEDMTRLTLDTIGLCGFNYRFNSFYRDQPHPFIVSVERALDEVMNKLQRANPDDPAYDENKRQCQEDIKVMNDYVDKIIADRKARGEQSHDLLTQMLNGKDPETGEPLDDGNIRYQIITFLIAGHETTSGLLSFALYFLVKNPHVLQKVAEEAARVLVDPVPSYKQVKQLKYVGMVLNEALRLWPTAPAFSLYAKEDTVLGGEYPLTKGDEVMVLIPQLHRDKTIWGDDVEEFRPERFENPSAIPQHAFKPFGNGQRACIGQQFALHEATLVLGMMLKHFDFEDHTNYELVIKEKLTLKPEGFVVKAKSKGIPLGGIPSPSTEQSAKKVRKKAENAHNTPLLVLYGSNAGTAEGTARDLADIAMSKGFAPQVATLDSHAGNLPREGAVLIVTASYNGHPPDNAKQFVDWLDQASADEVKGVRYSVFGCGDKNWAATYQKVPAFIDETLAAKGAENIADRGEADASDDFEGTYEEWSDHMWSDVAAYFNLDIENSEDNKSTLSLQFVDSAADMPLAKMHGAFSTNVVASKELQQPGSARSTRHLEIELPKEASYQEGDHLGVIPRNYEGIVNRVTARFGLSASQQIRLEAEEEKLAHLPLAKTVSVEELLQYVELQDPVTRTQLRAMAAKTVCPPHKVELEALLEKQAYKEQVLAKRLTMLELLEKYPACEMKFSEFIALLPSIRPRYYSISSSPRVDEKQASITVSVVSGPAWSGYGEYKGIASNYLAELQEGDTITCFISTDQSEFTLPKDPETPLIMVGPGTGVAPFRGFVQARKQLKEQGQSLGEAHLYFGCRSPHEDYLYQEELENAQSEGIITLHTAFSRMPNQPKTYVQHVMEQDGKKLIELLDQGAHFYICGDGSQMAPAVEATLMKSYADVHQVSEADARLWLQQLEEKGRYAKDVWAG

SEQ ID NO: 671 - DNA, 3147 bp, synthetic construct
  misc_feature 1..3147: note = Variant of cytochrome P450
  source 1..3147: mol_type = other DNA
atgacaattaaggaaatgcctcagcctaagacgtttggagaacttaaaaatttaccgttattaaacacagataaaccggttcaagctttgatgcgtattgcggatgaattaggagaaatctttaaattcgaggcgcctggtagcgtaacgcgctttttatcaagtcagcgtctaattaaagaagcatgcgatgaatcacgctttgataaaaacttaagtcaaggccttaaatttgcacgtgattttcttggagacgggttatttacaagctggacgcatgaaccgaattggaaaaaagcgcataatatcttaggcccaagctttagtcaggcggcaatgaaacgttatcatgcgatgatggtcgatatcgccgtgcagcttgttcaaaagtgggagcgtctaaatgcagatgagcatattgaagtatcggaagacatgacacgtttaacgctggatacaattggtctttgcggcttcaactatcgctttaacagcttttaccgagatcagcctcatccatttattgtgagtgttgagcgtgcactggatgaagtaatgaacaagctgcagcgagcaaatccagacgacccagcttatgatgaaaacaagcgccagtgtcaagaagatatcaaggtgatgaacgactatgtcgataaaattattgcagatcgcaaagcaaggggtgaacaaagccatgatttattaacgcagatgctaaacggaaaagatccagaaacgggtgagccgcttgatgacgggaacattcgttatcaaattattacattcttaattgcgggacacgaaacaacaagtggtcttttatcatttgcgctgtatttcttagtgaaaaatccacatgtattacaaaaagtagcagaagaagcagcacgagttctagtagatcctgttccaagctacaaacaagtcaaacagcttaaatatgtcggcatggtcttaaacgaagcgctgcgcttatggccaactgctcctgcgttttccctatatgcaaaagaagatacggtgcttggaggagaatatcctttaaccaaaggcgacgaagtaatggttctgattcctcagcttcaccgtgataaaacaatttggggagacgatgtggaggagttccgtccagagcgttttgaaaatccaagtgcgattccgcagcatgcgtttaaaccgtttggaaacggtcagcgtgcgtgtatcggtcagcagttcgctcttcatgaagcaacgctggtacttggtatgatgctaaaacactttgactttgaagatcatacaaactacgagctcgttattaaagaaaagttaacgttaaaacctgaaggctttgtggtaaaagcaaaatcgaaaggcattccgcttggcggtattccttcacctagcactgaacagtctgctaaaaaagtacgcaaaaaggcagaaaacgctcataatacgccgctgcttgtgctatacggttcaaatgcgggaacagctgaaggaacggcgcgtgatttagcagatattgcaatgagcaaaggatttgcaccgcaggtcgcaacgcttgattcacacgccggaaatcttccgcgcgaaggagctgtattaattgtaacggcgtcttataacggtcatccgcctgataacgcaaagcaatttgtcgactggttagaccaagcgtctgctgatgaagtaaaaggcgttcgctactccgtatttggatgcggcgataaaaactgggctgcgacgtatcaaaaagtgcctgcttttatcgatgaaacgcttgccgctaaaggggcagaaaacatcgctgaccgcggtgaagcagatgcaagcgacgactttgaaggcacatatgaagaatggagtgatcatatgtggagtgacgtagcagcctactttaacctcgacattgaaaacagtgaagataataaatctactctttcacttcaatttgtcgacagcgccgcggatatgccgcttgcgaaaatgcacggtgcgttttcaacgaacgtcgtagcaagcaaagaacttcaacagccaggcagtgcacgaagcacgcgacatcttgaaattgaacttccaaaagaagcttcttatcaagaaggagatcatttaggtgttattcctcgcaactatgaaggaatagtaaaccgtgtaacagcaaggttcggcctaagcgcatcacagcaaatccgtctggaagcagaagaagaaaaattagctcatttgccactcgctaaaacagtatccgtagaagagcttctgcaatacgtggagcttcaagatcctgttacgcgcacgcagcttcgcgcaatggctgctaaaacggtctgcccgccgcataaagtagagcttgaagccttgcttgaaaagcaagcctacaaagaacaagtgctggcaaaacgtttaacaatgcttgaactgcttgaaaaatacccggcgtgtgaaatgaaattcagcgaatttatcgcccttctgccaagcatacgcccgcgctattactcgatttcttcatcacctcgtgtcgatgaaaaacaagcaagcatcacggtcagcgttgtctcaggaccggcgtggagcggatatggagaatataaaggaattgcgtcgaactatcttgccgagctgcaagaaggagatacgattacgtgctttatttccacagatcagtcagaatttacgctgccaaaagaccctgaaacgccgcttatcatggtcggaccgggaacaggcgtcgcgccgtttagaggctttgtgcaggcgcgcaaacagctaaaagaacaaggacagtcacttggagaagcacatttatacttcggctgccgttcacctcatgaagactatctgtatcaagaagagcttgaaaacgcccaaagcgaaggcatcattacgcttcataccgctttttctcgcatgccaaatcagccgaaaacatacgttcagcacgtaatggaacaagacggcaagaaattgattgaacttcttgatcaaggagcgcacttctatatttgcggagacggaagccaaatggcacctgccgttgaagcaacgcttatgaaaagctatgctgacgttcaccaagtgagtgaagcagacgctcgcttatggctgcagcagctagaagaaaaaggccgatacgcaaaagacgtgtgggctggg

SEQ ID NO: 672 - protein, 1049 aa, synthetic construct
  REGION 1..1049: note = Variant of cytochrome P450
MTIKEMPQPKTFGELKNLPLLNTDKPVQALMRIADELGEIFKFEAPGSVTRFLSSQRLIKEACDESRFDKNLSQGLKFARDFLGDGLFTSWTHEPNWKKAHNILGPSFSQAAMKRYHAMMVDIAVQLVQKWERLNADEHIEVSEDMTRLTLDTIGLCGFNYRFNSFYRDQPHPFIVSVERALDEVMNKLQRANPDDPAYDENKRQCQEDIKVMNDYVDKIIADRKARGEQSHDLLTQMLNGKDPETGEPLDDGNIRYQIITFLIAGHETTSGLLSFALYFLVKNPHVLQKVAEEAARVLVDPVPSYKQVKQLKYVGMVLNEALRLWPTAPAFSLYAKEDTVLGGEYPLTKGDEVMVLIPQLHRDKTIWGDDVEEFRPERFENPSAIPQHAFKPFGNGQRACIGQQFALHEATLVLGMMLKHFDFEDHTNYELVIKEKLTLKPEGFVVKAKSKGIPLGGIPSPSTEQSAKKVRKKAENAHNTPLLVLYGSNAGTAEGTARDLADIAMSKGFAPQVATLDSHAGNLPREGAVLIVTASYNGHPPDNAKQFVDWLDQASADEVKGVRYSVFGCGDKNWAATYQKVPAFIDETLAAKGAENIADRGEADASDDFEGTYEEWSDHMWSDVAAYFNLDIENSEDNKSTLSLQFVDSAADMPLAKMHGAFSTNVVASKELQQPGSARSTRHLEIELPKEASYQEGDHLGVIPRNYEGIVNRVTARFGLSASQQIRLEAEEEKLAHLPLAKTVSVEELLQYVELQDPVTRTQLRAMAAKTVCPPHKVELEALLEKQAYKEQVLAKRLTMLELLEKYPACEMKFSEFIALLPSIRPRYYSISSSPRVDEKQASITVSVVSGPAWSGYGEYKGIASNYLAELQEGDTITCFISTDQSEFTLPKDPETPLIMVGPGTGVAPFRGFVQARKQLKEQGQSLGEAHLYFGCRSPHEDYLYQEELENAQSEGIITLHTAFSRMPNQPKTYVQHVMEQDGKKLIELLDQGAHFYICGDGSQMAPAVEATLMKSYADVHQVSEADARLWLQQLEEKGRYAKDVWAG

SEQ ID NO: 673 - DNA, 3147 bp, synthetic construct
  misc_feature 1..3147: note = Variant of cytochrome P450
  source 1..3147: mol_type = other DNA
atgacaattaaggaaatgcctcagcctaagacgtttggagaacttaaaaatttaccgttattaaacacagataaaccggttcaagctttgatgcgtattgcggatgaattaggagaaatctttaaattcgaggcgcctggtagcgtaacgcgctttttatcaagtcagcgtctaattaaagaagcatgcgatgaatcacgctttgataaaaacttaagtcaaggccttaaatttgcacgtgattttcttggagacgggttatttacaagctggacgcatgaaccgaattggaaaaaagcgcataatatcttaggcccaagctttagtcagcgtgcaatgaaacgttatcatgcgatgatggtcgatatcgccgtgcagcttgttcaaaagtgggagcgtctaaatgcagatgagcatattgaagtatcggaagacatgacacgtttaacgctggatacaattggtctttgcggcttcaactatcgctttaacagcttttaccgagatcagcctcatccatttattgtgagtgttgagcgtgcactggatgaagtaatgaacaagctgcagcgagcaaatccagacgacccagcttatgatgaaaacaagcgccagtgtcaagaagatatcaaggtgatgaacgactatgtcgataaaattattgcagatcgcaaagcaaggggtgaacaaagccatgatttattaacgcagatgctaaacggaaaagatccagaaacgggtgagccgcttgatgacgggaacattcgttatcaaattattacattcttaattgcgggacacgaaacaacaagtggtcttttatcatttgcgctgtatttcttagtgaaaaatccacatgtattacaaaaagtagcagaagaagcagcacgagttctagtagatcctgttccaagctacaaacaagtcaaacagcttaaatatgtcggcatggtcttaaacgaagcgctgcgcttatggccaactgctcctgcgttttccctatatgcaaaagaagatacggtgcttggaggagaatatcctttaaccaaaggcgacgaagtaatggttctgattcctcagcttcaccgtgataaaacaatttggggagacgatgtggaggagttccgtccagagcgttttgaaaatccaagtgcgattccgcagcatgcgtttaaaccgtttggaaacggtcagcgtgcgtgtatcggtcagcagttcgctcttcatgaagcaatgctggtacttggtatgatgctaaaacactttgactttgaagatcatacaaactacgagctcgttattaaagaaaagttaacgttaaaacctgaaggctttgtggtaaaagcaaaatcgaaaggcattccgcttggcggtattccttcacctagcactgaacagtctgctaaaaaagtacgcaaaaaggcagaaaacgctcataatacgccgctgcttgtgctatacggttcaaatgcgggaacagctgaaggaacggcgcgtgatttagcagatattgcaatgagcaaaggatttgcaccgcaggtcgcaacgcttgattcacacgccggaaatcttccgcgcgaaggagctgtattaattgtaacggcgtcttataacggtcatccgcctgataacgcaaagcaatttgtcgactggttagaccaagcgtctgctgatgaagtaaaaggcgttcgctactccgtatttggatgcggcgataaaaactgggctgcgacgtatcaaaaagtgcctgcttttatcgatgaaacgcttgccgctaaaggggcagaaaacatcgctgaccgcggtgaagcagatgcaagcgacgactttgaaggcacatatgaagaatggagtgatcatatgtggagtgacgtagcagcctactttaacctcgacattgaaaacagtgaagataataaatctactctttcacttcaatttgtcgacagcgccgcggatatgccgcttgcgaaaatgcacggtgcgttttcaacgaacgtcgtagcaagcaaagaacttcaacagccaggcagtgcacgaagcacgcgacatcttgaaattgaacttccaaaagaagcttcttatcaagaaggagatcatttaggtgttattcctcgcaactatgaaggaatagtaaaccgtgtaacagcaaggttcggcctaagcgcatcacagcaaatccgtctggaagcagaagaagaaaaattagctcatttgccactcgctaaaacagtatccgtagaagagcttctgcaatacgtggagcttcaagatcctgttacgcgcacgcagcttcgcgcaatggctgctaaaacggtctgcccgccgcataaagtagagcttgaagccttgcttgaaaagcaagcctacaaagaacaagtgctggcaaaacgtttaacaatgcttgaactgcttgaaaaatacccggcgtgtgaaatgaaattcagcgaatttatcgcccttctgccaagcatacgcccgcgctattactcgatttcttcatcacctcgtgtcgatgaaaaacaagcaagcatcacggtcagcgttgtctcaggaccggcgtggagcggatatggagaatataaaggaattgcgtcgaactatcttgccgagctgcaagaaggagatacgattacgtgctttatttccacagatcagtcagaatttacgctgccaaaagaccctgaaacgccgcttatcatggtcggaccgggaacaggcgtcgcgccgtttagaggctttgtgcaggcgcgcaaacagctaaaagaacaaggacagtcacttggagaagcacatttatacttcggctgccgttcacctcatgaagactatctgtatcaagaagagcttgaaaacgcccaaagcgaaggcatcattacgcttcataccgctttttctcgcatgccaaatcagccgaaaacatacgttcagcacgtaatggaacaagacggcaagaaattgattgaacttcttgatcaaggagcgcacttctatatttgcggagacggaagccaaatggcacctgccgttgaagcaacgcttatgaaaagctatgctgacgttcaccaagtgagtgaagcagacgctcgcttatggctgcagcagctagaagaaaaaggccgatacgcaaaagacgtgtgggctggg

SEQ ID NO: 674 - protein, 1049 aa, synthetic construct
  REGION 1..1049: note = Variant of cytochrome P450
MTIKEMPQPKTFGELKNLPLLNTDKPVQALMRIADELGEIFKFEAPGSVTRFLSSQRLIKEACDESRFDKNLSQGLKFARDFLGDGLFTSWTHEPNWKKAHNILGPSFSQRAMKRYHAMMVDIAVQLVQKWERLNADEHIEVSEDMTRLTLDTIGLCGFNYRFNSFYRDQPHPFIVSVERALDEVMNKLQRANPDDPAYDENKRQCQEDIKVMNDYVDKIIADRKARGEQSHDLLTQMLNGKDPETGEPLDDGNIRYQIITFLIAGHETTSGLLSFALYFLVKNPHVLQKVAEEAARVLVDPVPSYKQVKQLKYVGMVLNEALRLWPTAPAFSLYAKEDTVLGGEYPLTKGDEVMVLIPQLHRDKTIWGDDVEEFRPERFENPSAIPQHAFKPFGNGQRACIGQQFALHEAMLVLGMMLKHFDFEDHTNYELVIKEKLTLKPEGFVVKAKSKGIPLGGIPSPSTEQSAKKVRKKAENAHNTPLLVLYGSNAGTAEGTARDLADIAMSKGFAPQVATLDSHAGNLPREGAVLIVTASYNGHPPDNAKQFVDWLDQASADEVKGVRYSVFGCGDKNWAATYQKVPAFIDETLAAKGAENIADRGEADASDDFEGTYEEWSDHMWSDVAAYFNLDIENSEDNKSTLSLQFVDSAADMPLAKMHGAFSTNVVASKELQQPGSARSTRHLEIELPKEASYQEGDHLGVIPRNYEGIVNRVTARFGLSASQQIRLEAEEEKLAHLPLAKTVSVEELLQYVELQDPVTRTQLRAMAAKTVCPPHKVELEALLEKQAYKEQVLAKRLTMLELLEKYPACEMKFSEFIALLPSIRPRYYSISSSPRVDEKQASITVSVVSGPAWSGYGEYKGIASNYLAELQEGDTITCFISTDQSEFTLPKDPETPLIMVGPGTGVAPFRGFVQARKQLKEQGQSLGEAHLYFGCRSPHEDYLYQEELENAQSEGIITLHTAFSRMPNQPKTYVQHVMEQDGKKLIELLDQGAHFYICGDGSQMAPAVEATLMKSYADVHQVSEADARLWLQQLEEKGRYAKDVWAG

SEQ ID NO: 675 - DNA, 3147 bp, synthetic construct
  misc_feature 1..3147: note = Variant of cytochrome P450
  source 1..3147: mol_type = other DNA
atgacaattaaggaaatgcctcagcctaagacgtttggagaacttaaaaatttaccgttattaaacacagataaaccggttcaagctttgatgcgtattgcggatgaattaggagaaatctttaaattcgaggcgcctggtagcgtaacgcgctttttatcaagtcagcgtctaattaaagaagcatgcgatgaaagtcgctttgataaaaacttaagtcaaggccttaaatttgcacgtgattttcttggagacgggttatttacaagctggacgcatgaaccgaattggaaaaaagcgcataatatcttaggcccaagctttagtcagcgtgcaatgaaacgttatcatgcgatgatggtcgatatcgccgtgcagcttgttcaaaagtgggagcgtctaaatgcagatgagcatattgaagtatcggaagacatgacacgtttaacgctggatacaattggtctttgcggcttcaactatcgctttaacagcttttaccgagatcagcctcatccatttattgtgagtgttgagagtgcactggatgaagtaatgaacaagctgcagcgagcaaatccagacgacccagcttatgatgaaaacaagcgccagtgtcaagaagacatcaaggtgatgaacgactatgtcgataaaattattgcagatcgcaaagcaaggggtgaacaaagccatgatttattaacgcagatgctaaacggaaaagatccagaaacgggtgagccgcttgatgacgggaacattcgttatcaaattattacattcttaattgcgggacacgaaacaacaagtggtcttttatcatttgcgctgtatttcttagtgaaaaatccacatgtattacaaaaagtagcagaagaagcagcacgagttctagtagatcctgttccaagctacaaacaagtcaaacagcttaaatatgtcggcatggtcttaaacgaagcgctgcgcttatggccaactgctcctgcgttttccctatatgcaaaagaagatacggtgcttggaggagaatatcctttaaccaaaggcgacgaagtaatggttctgattcctcagcttcaccgtgataaaacaatttggggagacgatgtggaggagttccgtccagagcgttttgaaaatccaagtgcgattccgcagcatgcgtttaaaccgtttggaaacggtcagcgtgcgtgtatcggttggcagttcgctcttcatgaagcaacgctggtacttggtatgatgctaaaacactttgactttgaagatcatacaaactacgagctcgttattaaagaaaagttaacgttaaaacctgaaggctttgtggtaaaagcaaaatcgaaaggcattccgcttggcctgattccttcacctagcactgaacagtctgctaaaaaagtacgcaaaaaggcagaaaacgctcataatacgccgctgcttgtgctatacggttcaaatgcgggaacagctgaaggaacggcgcgtgatttagcagatattgcaatgagcaaaggatttgcaccgcaggtcgcaacgcttgattcacacgccggaaatcttccgcgcgaaggagctgtattaattgtaacggcgtcttataacggtcatccgcctgataacgcaaagcaatttgtcgactggttagaccaagcgtctgctgatgaagtaaaaggcgttcgctactccgtatttggatgcggcgataaaaactgggctgcgacgtatcaaaaagtgcctgcttttatcgatgaaacgcttgccgctaaaggggcagaaaacatcgctgaccgcggtgaagcagatgcaagcgacgactttgaaggcgcgtatgaagaatggagtgatcatatgtggagtgacgtagcagcctactttaacctcgacattgaaaacagtgaagataataaatctactctttcacttcaatttgtcgacagcgccgcggatatgccgcttgcgaaaatgcacggtgcgttttcaacgaacgtcgtagcaagcaaagaacttcaacagccaggcagtgcacgaagcacgcgacatcttgaaattgaacttccaaaagaagcttcttatcaagaaggagatcatttaggtgttattcctcgcaactatgaaggaatagtaaaccgtgtaacagcaaggttcggcctaagcgcatcacagcaaatccgtctggaagcagaagaagaaaaattagctcatttgccactcgctaaaacagtatccgtagaagagcttctgcaatacgtggagcttcaagatcctgttacgcgcacgcagcttcgcgcaatggctgctaaaacggtctgcccgccgcataaagtagagcttgaagccttgcttgaaaagcaagcctacaaagaacaagtgctggcaaaacgtttaacaatgcttgaactgcttgaaaaatacccggcgtgtgaaatgaaattcagcgaatttatcgcccttctgccaagcatacgcccgcgctattactcgatttcttcatcacctcgtgtcgatgaaaaacaagcaagcatcacggtcagcgttgtctcaggaccggcgtggagcggatatggagaatataaaggaattgcgtcgaactatcttgccgagctgcaagaaggagatacgattacgtgctttatttccacagatcagtcagaatttacgctgccaaaagaccctgaaacgccgcttatcatggtcggaccgggaacaggcgtcgcgccgtttagaggctttgtgcaggcgcgcaaacagctaaaagaacaaggacagtcacttggagaagcacatttatacttcggctgccgttcacctcatgaagactatctgtatcaagaagagcttgaaaacgcccaaagcgaaggcatcattacgcttcataccgctttttctcgcatgccaaatcagccgaaaacatacgttcagcacgtaatggaacaagacggcaagaaattgattgaacttcttgatcaaggagcgcacttctatatttgcggagacggaagccaaatggcacctgccgttgaagcaacgcttatgaaaagctatgctgacgttcaccaagtgagtgaagcagacgctcgcttatggctgcagcagctagaagaaaaaggccgatacgcaaaagacgtgtgggctggg

SEQ ID NO: 676 - protein, 1049 aa, synthetic construct
  REGION 1..1049: note = Variant of cytochrome P450
MTIKEMPQPKTFGELKNLPLLNTDKPVQALMRIADELGEIFKFEAPGSVTRFLSSQRLIKEACDESRFDKNLSQGLKFARDFLGDGLFTSWTHEPNWKKAHNILGPSFSQRAMKRYHAMMVDIAVQLVQKWERLNADEHIEVSEDMTRLTLDTIGLCGFNYRFNSFYRDQPHPFIVSVESALDEVMNKLQRANPDDPAYDENKRQCQEDIKVMNDYVDKIIADRKARGEQSHDLLTQMLNGKDPETGEPLDDGNIRYQIITFLIAGHETTSGLLSFALYFLVKNPHVLQKVAEEAARVLVDPVPSYKQVKQLKYVGMVLNEALRLWPTAPAFSLYAKEDTVLGGEYPLTKGDEVMVLIPQLHRDKTIWGDDVEEFRPERFENPSAIPQHAFKPFGNGQRACIGWQFALHEATLVLGMMLKHFDFEDHTNYELVIKEKLTLKPEGFVVKAKSKGIPLGLIPSPSTEQSAKKVRKKAENAHNTPLLVLYGSNAGTAEGTARDLADIAMSKGFAPQVATLDSHAGNLPREGAVLIVTASYNGHPPDNAKQFVDWLDQASADEVKGVRYSVFGCGDKNWAATYQKVPAFIDETLAAKGAENIADRGEADASDDFEGAYEEWSDHMWSDVAAYFNLDIENSEDNKSTLSLQFVDSAADMPLAKMHGAFSTNVVASKELQQPGSARSTRHLEIELPKEASYQEGDHLGVIPRNYEGIVNRVTARFGLSASQQIRLEAEEEKLAHLPLAKTVSVEELLQYVELQDPVTRTQLRAMAAKTVCPPHKVELEALLEKQAYKEQVLAKRLTMLELLEKYPACEMKFSEFIALLPSIRPRYYSISSSPRVDEKQASITVSVVSGPAWSGYGEYKGIASNYLAELQEGDTITCFISTDQSEFTLPKDPETPLIMVGPGTGVAPFRGFVQARKQLKEQGQSLGEAHLYFGCRSPHEDYLYQEELENAQSEGIITLHTAFSRMPNQPKTYVQHVMEQDGKKLIELLDQGAHFYICGDGSQMAPAVEATLMKSYADVHQVSEADARLWLQQLEEKGRYAKDVWAG

SEQ ID NO: 677 - DNA, 3147 bp, synthetic construct
  misc_feature 1..3147: note = Variant of cytochrome P450
  source 1..3147: mol_type = other DNA
atgacaattaaggaaatgcctcagcctaagacgtttggagaacttaaaaatttaccgttattaaacacagataaaccggttcaagctttgatgcgtattgcggatgaattaggagaaatctttaaattcgaggcgcctggtagcgtaacgcgctttttatcaagtcagcgtctaattaaagaagcatgcgatgaacgccgctttgataaaaacttaagtcaaggccttaaatttgcacgtgattttcttggagacgggttatttacaagctggacgcatgaaccgaattggaaaaaagcgcataatatcttaggcccaagctttagtcagcacgcaatgggccgttatcatgcgatgatggtcgatatcgccgtgcagcttgttcaaaagtgggagcgtctaaatgcagatgagcatattgaagtatcggaagacatgacacgtttaacgctggatacaattggtctttgcggcttcaactatcgctttaacagcttttaccgagatcagccgcatccatttattgtgagtgttgagggtgcactggatgaagtaatgaacaagctgcagcgagcaaatccagacgacccagcttatgatgaaaacaagcgccagtgtcaagaagacatcaaggtgatgaacgactatgtcgataaaattattgcagatcgcaaagcaaggggtgaacaaagccatgatttattaacgcagatgctaaacggaaaagatccagaaacgggtgagccgcttgatgacgggaacattcgttatcaaattattacattcttaattgcgggacacgaaacaacaagtggtcttttatcatttgcgctgtatttcttagtgaaaaatccacatgtattacaaaaagtagcagaagaagcagcacgagttctagtagatcctgttccaagctacaaacaagtcaaacagcttaaatatgtcggcatggtcttaaacgaagcgctgcgcttatggccaactgctcctgcgttttccctatatgcaaaagaagatacggtacttggaggagaatatcctttaaccaaaggcgacgaagtaatggttctgattcctcagcttcaccgtgataaaacaatttggggagacgatgttgaggaattccgtccagagcgttttgaaaatccaagtgcgattccgcagcatgcgtttaaaccgtttggaaacggtcagcgtgcgtgtatcggttggcagttcgctcttcatgaagcacaactggtacttggtatgatgctaaaacactttgactttgaagatcatacaaactacgagctcgttattaaagaaatgttaacgttaaaacctgaaggctttgtggtaaaagcaaaatcgaaaggcattccgcttggcctgattccttcacctagcactgaacagtctgctaaaaaagtacgcaaaaaggcagaaaacgctcataatacgccgctgcttgtgctatacggttcaaatgcgggaacagctgaaggaacggcgcgtgatttagcagatattgcaatgagcaaaggatttgcaccgcaggtcgcaacgcttgattcacacgccggaaatcttccgcgcgaaggagctgtattaattgtaacggcgtcttataacggtcatccgcctgataacgcaaagcagtttgtcgactggttagaccaagcgtctgctgatgaagtaaaaggcgttcgctactccgtatttggatgcggcgataaaaactgggctgcgacgtatcaaaaagtgcctgcttttatcgatgaaacgcttgccgctaaaggggcagaaaacatcgctgaccgcggtgaagcagatgcaagcgacgactttgaaggcgcgtatgaagaatggagtgatcatatgtggagtgacgtagcagcctactttaacctcgacattgaaaacagtgaagataataaatctactctttcacttcaatttgtcgacagcgccgcggatatgccgcttgcgaaaatgcacggtgcgttttcaacgaacgtcgtagcaagcaaagaacttcaacagccaggcagtgcacgaagcacgcgacatcttgaaattgaacttccaaaagaagcttcttatcaagaaggagatcatttaggtgttattcctcgcaactatgaaggaatagtaaaccgtgtaacagcaaggttcggcctaagcgcatcacagcaaatccgtctggaagcagaagaagaaaaattagctcatttgccactcgctaaaacagtatccgtagaagagcttctgcaatacgtggagcttcaagatcctgttacgcgcacgcagcttcgcgcaatggctgctaaaacggtctgcccgccgcataaagtagagcttgaagccttgcttgaaaagcaagcctacaaagaacaagtgctggcaaaacgtttaacaatgcttgaactgcttgaaaaatacccggcgtgtgaaatgaaattcagcgaatttatcgcccttctgccaagcatacgcccgcgctattactcgatttcttcatcacctcgtgtcgatgaaaaacaagcaagcatcacggtcagcgttgtctcaggaccggcgtggagcggatatggagaatataaaggaattgcgtcgaactatcttgccgagctgcaagaaggagatacgattacgtgctttatttccacagatcagtcagaatttacgctgccaaaagaccctgaaacgccgcttatcatggtcggaccgggaacaggcgtcgcgccgtttagaggctttgtgcaggcgcgcaaacagctaaaagaacaaggacagtcacttggagaagcacatttatacttcggctgccgttcacctcatgaagactatctgtatcaagaagagcttgaaaacgcccaaagcgaaggcatcattacgcttcataccgctttttctcgcatgccaaatcagccgaaaacatacgttcagcacgtaatggaacaagacggcaagaaattgattgaacttcttgatcaaggagcgcacttctatatttgcggagacggaagccaaatggcacctgccgttgaagcaacgcttatgaaaagctatgctgacgttcaccaagtgagtgaagcagacgctcgcttatggctgcagcagctagaagaaaaaggccgatacgcaaaagacgtgtgggctggg

SEQ ID NO: 678 - protein, 1049 aa, synthetic construct
  REGION 1..1049: note = Variant of cytochrome P450
MTIKEMPQPKTFGELKNLPLLNTDKPVQALMRIADELGEIFKFEAPGSVTRFLSSQRLIKEACDERRFDKNLSQGLKFARDFLGDGLFTSWTHEPNWKKAHNILGPSFSQHAMGRYHAMMVDIAVQLVQKWERLNADEHIEVSEDMTRLTLDTIGLCGFNYRFNSFYRDQPHPFIVSVEGALDEVMNKLQRANPDDPAYDENKRQCQEDIKVMNDYVDKIIADRKARGEQSHDLLTQMLNGKDPETGEPLDDGNIRYQIITFLIAGHETTSGLLSFALYFLVKNPHVLQKVAEEAARVLVDPVPSYKQVKQLKYVGMVLNEALRLWPTAPAFSLYAKEDTVLGGEYPLTKGDEVMVLIPQLHRDKTIWGDDVEEFRPERFENPSAIPQHAFKPFGNGQRACIGWQFALHEAQLVLGMMLKHFDFEDHTNYELVIKEMLTLKPEGFVVKAKSKGIPLGLIPSPSTEQSAKKVRKKAENAHNTPLLVLYGSNAGTAEGTARDLADIAMSKGFAPQVATLDSHAGNLPREGAVLIVTASYNGHPPDNAKQFVDWLDQASADEVKGVRYSVFGCGDKNWAATYQKVPAFIDETLAAKGAENIADRGEADASDDFEGAYEEWSDHMWSDVAAYFNLDIENSEDNKSTLSLQFVDSAADMPLAKMHGAFSTNVVASKELQQPGSARSTRHLEIELPKEASYQEGDHLGVIPRNYEGIVNRVTARFGLSASQQIRLEAEEEKLAHLPLAKTVSVEELLQYVELQDPVTRTQLRAMAAKTVCPPHKVELEALLEKQAYKEQVLAKRLTMLELLEKYPACEMKFSEFIALLPSIRPRYYSISSSPRVDEKQASITVSVVSGPAWSGYGEYKGIASNYLAELQEGDTITCFISTDQSEFTLPKDPETPLIMVGPGTGVAPFRGFVQARKQLKEQGQSLGEAHLYFGCRSPHEDYLYQEELENAQSEGIITLHTAFSRMPNQPKTYVQHVMEQDGKKLIELLDQGAHFYICGDGSQMAPAVEATLMKSYADVHQVSEADARLWLQQLEEKGRYAKDVWAG

SEQ ID NO: 679 - DNA, 3147 bp, synthetic construct
  misc_feature 1..3147: note = Variant of cytochrome P450
  source 1..3147: mol_type = other DNA
atgacaattaaggaaatgcctcagcctaagacgtttggagaacttaaaaatttaccgttattaaacacagataaaccggttcaagctttgatgcgtattgcggatgaattaggagaaatctttaaattcgaggcgcctggtagcgtaacgcgctttttatcaagtcagcgtctaattaaagaagcatgcgatgaaagccgctttgataaaaacttaagtcaaggccttaaatttgcacgtgattttcttggagacgggttatttacaagctggacgcatgaaccgaattggaaaaaagcgcataatatcttaggcccaagctttagtcagctggcaatgggccgttatcatgcgatgatggtcgatatcgccgtgcagcttgttcaaaagtgggagcgtctaaatgcagatgagcatattgaagtatcggaagacatgacacgtttaacgctggatacaattggtctttgcggcttcaactatcgctttaacagcttttaccgagatcagccgcatccatttattgtgagtgttgagggtgcactggatgaagtaatgaacaagctgcagcgagcaaatccagacgacccagcttatgatgaaaacaagcgccagtgtcaagaagacatcaaggtgatgaacgactatgtcgataaaattattgcagatcgcaaagcaaggggtgaacaaagccatgatttattaacgcagatgctaaacggaaaagatccagcaacgggtgagccgcttgatgacgggaacattcgttatcaaattctgacattcttaattgcgggacacgaaacaacaagtggtcttttatcatttgcgctgtatttcttagtgaaaaatccacatgtattacaaaaagtagcagaagaagcagcacgagttctagtagatcctgttccaagctacaaacaagtcaaacagcttaaatatgtcggcatggtcttaaacgaagcgctgcgcttatggccaactgctcctgcgttttccctatatgcaaaagaagatacggtacttggaggagaatatcctttaaccaaaggcgacgaagtaatggttctgattcctcagcttcaccgtgataaaacaatttggggagacgatgtggaggagttccgtccagagcgttttgaaaatccaagtgcgattccgcagcatgcgtttaaaccgtttggaaacggtcagcgtgcgtgtatcggttggcagttcgctcttcatgaagcaacgctggtacttggtatgatgctaaaacactttgactttgaagatcatacaaactacgagctcgttattaaagaaaagttaacgttaaaacctgaaggctttgtggtaaaagcaaaatcgaaaggcattccgcttggcctgattccttcacctagcactgaacagtctgctaaaaaagtacgcaaaaaggcagaaaacgctcataatacgccgctgcttgtgctatacggttcaaatgcgggaacagctgaaggaacggcgcgtgatttagcagatattgcaatgagcaaaggatttgcaccgcaggtcgcaacgcttgattcacacgccggaaatcttccgcgcgaaggagctgtattaattgtaacggcgtcttataacggtcatccgcctgataacgcaaagcagtttgtcgactggttagaccaagcgtctgctgatgaagtaaaaggcgttcgctactccgtatttggatgcggcgataaaaactgggctgcgacgtatcaaaaagtgcctgcttttatcgatgaaacgcttgccgctaaaggggcagaaaacatcgctgaccgcggtgaagcagatgcaagcgacgactttgaaggcgcgtatgaagaatggagtgatcatatgtggagtgacgtagcagcctactttaacctcgacattgaaaacagtgaagataataaatctactctttcacttcaatttgtcgacagcgccgcggatatgccgcttgcgaaaatgcacggtgcgttttcaacgaacgtcgtagcaagcaaagaacttcaacagccaggcagtgcacgaagcacgcgacatcttgaaattgaacttccaaaagaagcttcttatcaagaaggagatcatttaggtgttattcctcgcaactatgaaggaatagtaaaccgtgtaacagcaaggttcggcctaagcgcatcacagcaaatccgtctggaagcagaagaagaaaaattagctcatttgccactcgctaaaacagtatccgtagaagagcttctgcaatacgtggagcttcaagatcctgttacgcgcacgcagcttcgcgcaatggctgctaaaacggtctgcccgccgcataaagtagagcttgaagccttgcttgaaaagcaagcctacaaagaacaagtgctggcaaaacgtttaacaatgcttgaactgcttgaaaaatacccggcgtgtgaaatgaaattcagcgaatttatcgcccttctgccaagcatacgcccgcgctattactcgatttcttcatcacctcgtgtcgatgaaaaacaagcaagcatcacggtcagcgttgtctcaggaccggcgtggagcggatatggagaatataaaggaattgcgtcgaactatcttgccgagctgcaagaaggagatacgattacgtgctttatttccacagatcagtcagaatttacgctgccaaaagaccctgaaacgccgcttatcatggtcggaccgggaacaggcgtcgcgccgtttagaggctttgtgcaggcgcgcaaacagctaaaagaacaaggacagtcacttggagaagcacatttatacttcggctgccgttcacctcatgaagactatctgtatcaagaagagcttgaaaacgcccaaagcgaaggcatcattacgcttcataccgctttttctcgcatgccaaatcagccgaaaacatacgttcagcacgtaatggaacaagacggcaagaaattgattgaacttcttgatcaaggagcgcacttctatatttgcggagacggaagccaaatggcacctgccgttgaagcaacgcttatgaaaagctatgctgacgttcaccaagtgagtgaagcagacgctcgcttatggctgcagcagctagaagaaaaaggccgatacgcaaaagacgtgtgggctggg

SEQ ID NO: 680 - protein, 1049 aa, synthetic construct
  REGION 1..1049: note = Variant of cytochrome P450
MTIKEMPQPKTFGELKNLPLLNTDKPVQALMRIADELGEIFKFEAPGSVTRFLSSQRLIKEACDESRFDKNLSQGLKFARDFLGDGLFTSWTHEPNWKKAHNILGPSFSQLAMGRYHAMMVDIAVQLVQKWERLNADEHIEVSEDMTRLTLDTIGLCGFNYRFNSFYRDQPHPFIVSVEGALDEVMNKLQRANPDDPAYDENKRQCQEDIKVMNDYVDKIIADRKARGEQSHDLLTQMLNGKDPATGEPLDDGNIRYQILTFLIAGHETTSGLLSFALYFLVKNPHVLQKVAEEAARVLVDPVPSYKQVKQLKYVGMVLNEALRLWPTAPAFSLYAKEDTVLGGEYPLTKGDEVMVLIPQLHRDKTIWGDDVEEFRPERFENPSAIPQHAFKPFGNGQRACIGWQFALHEATLVLGMMLKHFDFEDHTNYELVIKEKLTLKPEGFVVKAKSKGIPLGLIPSPSTEQSAKKVRKKAENAHNTPLLVLYGSNAGTAEGTARDLADIAMSKGFAPQVATLDSHAGNLPREGAVLIVTASYNGHPPDNAKQFVDWLDQASADEVKGVRYSVFGCGDKNWAATYQKVPAFIDETLAAKGAENIADRGEADASDDFEGAYEEWSDHMWSDVAAYFNLDIENSEDNKSTLSLQFVDSAADMPLAKMHGAFSTNVVASKELQQPGSARSTRHLEIELPKEASYQEGDHLGVIPRNYEGIVNRVTARFGLSASQQIRLEAEEEKLAHLPLAKTVSVEELLQYVELQDPVTRTQLRAMAAKTVCPPHKVELEALLEKQAYKEQVLAKRLTMLELLEKYPACEMKFSEFIALLPSIRPRYYSISSSPRVDEKQASITVSVVSGPAWSGYGEYKGIASNYLAELQEGDTITCFISTDQSEFTLPKDPETPLIMVGPGTGVAPFRGFVQARKQLKEQGQSLGEAHLYFGCRSPHEDYLYQEELENAQSEGIITLHTAFSRMPNQPKTYVQHVMEQDGKKLIELLDQGAHFYICGDGSQMAPAVEATLMKSYADVHQVSEADARLWLQQLEEKGRYAKDVWAG

SEQ ID NO: 681 - DNA, 3147 bp, synthetic construct
  misc_feature 1..3147: note = Variant of cytochrome P450
  source 1..3147: mol_type = other DNA
atgacaattaaggaaatgcctcagcctaagacgtttggagaacttaaaaatttaccgttattaaacacagataaaccggttcaagctttgatgcgtattgcggatgaattaggagaaatctttaaattcgaggcgcctggtagcgtaacgcgctttttatcaagtcagcgtctaattaaagaagcatgcgatgaaagccgctttgataaaaacttaagtcaaggccttaaatttgcacgtgattttcttggagacgggttatttacaagctggacgcatgaaccgaattggaaaaaagcgcataatatcttaggcccaagctttagtcagctggcaatgggccgttatcatgcgatgatggtcgatatcgccgtgcagcttgttcaaaagtgggagcgtctaaatgcagatgagcatattgaagtatcggaagacatgacacgtttaacgctggatacaattggtctttgcggcttcaactatcgctttaacagcttttaccgagatcagcctcatccatttattgtgagtgttgagggtgcactggatgaagtaatgaacaagctgcagcgagcaaatccagacgacccagcttatgatgaaaacaagcgccagtgtcaagaagacatcaaggtgatgaacgactatgtcgataaaattattgcagatcgcaaagcaaggggtgaacaaagccatgatttattaacgcagatgctaaacggaaaagatccagaaacgggtgagccgcttgatgacgggaacattcgttatcaaattattacattcttaattgcgggacacgaaacaacaagtggtcttttatcatttgcgctgtatttcttagtgaaaaatccacatgtattacaaaaagtagcagaagaagcagcacgagttctagtagatcctgttccaagctacaaacaagtcaaacagcttaaatatgtcggcatggtcttaaacgaagcgctgcgcttatggccaactgctcctgcgttttccctatatgcaaaagaagatacggtgcttggaggagaatatcctttaaccaaaggcgacgaagtaatggttctgattcctcagcttcaccgtgataaaacaatttggggagacgatgttgaggaattccgtccagagcgttttgaaaatccaagtgcgattccgcagcatgcgtttaaaccgtttggaaacggtcagcgtgcgtgtatcggttggcagttcgctcttcatgaagcacaactggtacttggtatgatgctaaaacactttgactttgaagatcatacaaactacgagctcgttattaaagaaaagttaacgttaaaacctgaaggctttgtggtaaaagcaaaatcgaaaggcattccgcttggcctgattccttcacctagcactgaacagtctgctaaaaaagtacgcaaaaaggcagaaaacgctcataatacgccgctgcttgtgctatacggttcaaatgcgggaacagctgaaggaacggcgcgtgatttagcagatattgcaatgagcaaaggatttgcaccgcaggtcgcaacgcttgattcacacgccggaaatcttccgcgcgaaggagctgtattaattgtaacggcgtcttataacggtcatccgcctgataacgcaaagcagtttgtcgactggttagaccaagcgtctgctgatgaagtaaaaggcgttcgctactccgtatttggatgcggcgataaaaactgggctgcgacgtatcaaaaagtgcctgcttttatcgatgaaacgcttgccgctaaaggggcagaaaacatcgctgaccgcggtgaagcagatgcaagcgacgactttgaaggcgcgtatgaagaatggagtgatcatatgtggagtgacgtagcagcctactttaacctcgacattgaaaacagtgaagataataaatctactctttcacttcaatttgtcgacagcgccgcggatatgccgcttgcgaaaatgcacggtgcgttttcaacgaacgtcgtagcaagcaaagaacttcaacagccaggcagtgcacgaagcacgcgacatcttgaaattgaacttccaaaagaagcttcttatcaagaaggagatcatttaggtgttattcctcgcaactatgaaggaatagtaaaccgtgtaacagcaaggttcggcctaagcgcatcacagcaaatccgtctggaagcagaagaagaaaaattagctcatttgccactcgctaaaacagtatccgtagaagagcttctgcaatacgtggagcttcaagatcctgttacgcgcacgcagcttcgcgcaatggctgctaaaacggtctgcccgccgcataaagtagagcttgaagccttgcttgaaaagcaagcctacaaagaacaagtgctggcaaaacgtttaacaatgcttgaactgcttgaaaaatacccggcgtgtgaaatgaaattcagcgaatttatcgcccttctgccaagcatacgcccgcgctattactcgatttcttcatcacctcgtgtcgatgaaaaacaagcaagcatcacggtcagcgttgtctcaggaccggcgtggagcggatatggagaatataaaggaattgcgtcgaactatcttgccgagctgcaagaaggagatacgattacgtgctttatttccacagatcagtcagaatttacgctgccaaaagaccctgaaacgccgcttatcatggtcggaccgggaacaggcgtcgcgccgtttagaggctttgtgcaggcgcgcaaacagctaaaagaacaaggacagtcacttggagaagcacatttatacttcggctgccgttcacctcatgaagactatctgtatcaagaagagcttgaaaacgcccaaagcgaaggcatcattacgcttcataccgctttttctcgcatgccaaatcagccgaaaacatacgttcagcacgtaatggaacaagacggcaagaaattgattgaacttcttgatcaaggagcgcacttctatatttgcggagacggaagccaaatggcacctgccgttgaagcaacgcttatgaaaagctatgctgacgttcaccaagtgagtgaagcagacgctcgcttatggctgcagcagctagaagaaaaaggccgatacgcaaaagacgtgtgggctggg

SEQ ID NO: 682 - protein, 1049 aa, synthetic construct
  REGION 1..1049: note = Variant of cytochrome P450
MTIKEMPQPKTFGELKNLPLLNTDKPVQALMRIADELGEIFKFEAPGSVTRFLSSQRLIKEACDESRFDKNLSQGLKFARDFLGDGLFTSWTHEPNWKKAHNILGPSFSQLAMGRYHAMMVDIAVQLVQKWERLNADEHIEVSEDMTRLTLDTIGLCGFNYRFNSFYRDQPHPFIVSVEGALDEVMNKLQRANPDDPAYDENKRQCQEDIKVMNDYVDKIIADRKARGEQSHDLLTQMLNGKDPETGEPLDDGNIRYQIITFLIAGHETTSGLLSFALYFLVKNPHVLQKVAEEAARVLVDPVPSYKQVKQLKYVGMVLNEALRLWPTAPAFSLYAKEDTVLGGEYPLTKGDEVMVLIPQLHRDKTIWGDDVEEFRPERFENPSAIPQHAFKPFGNGQRACIGWQFALHEAQLVLGMMLKHFDFEDHTNYELVIKEKLTLKPEGFVVKAKSKGIPLGLIPSPSTEQSAKKVRKKAENAHNTPLLVLYGSNAGTAEGTARDLADIAMSKGFAPQVATLDSHAGNLPREGAVLIVTASYNGHPPDNAKQFVDWLDQASADEVKGVRYSVFGCGDKNWAATYQKVPAFIDETLAAKGAENIADRGEADASDDFEGAYEEWSDHMWSDVAAYFNLDIENSEDNKSTLSLQFVDSAADMPLAKMHGAFSTNVVASKELQQPGSARSTRHLEIELPKEASYQEGDHLGVIPRNYEGIVNRVTARFGLSASQQIRLEAEEEKLAHLPLAKTVSVEELLQYVELQDPVTRTQLRAMAAKTVCPPHKVELEALLEKQAYKEQVLAKRLTMLELLEKYPACEMKFSEFIALLPSIRPRYYSISSSPRVDEKQASITVSVVSGPAWSGYGEYKGIASNYLAELQEGDTITCFISTDQSEFTLPKDPETPLIMVGPGTGVAPFRGFVQARKQLKEQGQSLGEAHLYFGCRSPHEDYLYQEELENAQSEGIITLHTAFSRMPNQPKTYVQHVMEQDGKKLIELLDQGAHFYICGDGSQMAPAVEATLMKSYADVHQVSEADARLWLQQLEEKGRYAKDVWAG

SEQ ID NO: 683 - DNA, 3147 bp, synthetic construct
  misc_feature 1..3147: note = Variant of cytochrome P450
  source 1..3147: mol_type = other DNA
atgacaattaaggaaatgcctcagcctaagacgtttggagaacttaaaaatttaccgttattaaacacagataaaccggttcaagctttgatgcgtattgcggatgaattaggagaaatctttaaattcgaggcgcctggtagcgtaacgcgctttttatcaagtcagcgtctaattaaagaagcatgcgatgaaagccgctttgataaaaacttaagtcaaggccttaaatttgcacgtgattttcttggagacgggttatttacaagctggacgcatgaaccgaattggaaaaaagcgcataatatcttaggcccaagctttagtcagctggcaatgggccgttatcatgcgatgatggtcgatatcgccgtgcagcttgttcaaaagtgggagcgtctaaatgcagatgagcatattgaagtatcggaagacatgacacgtttaacgctggatacaattggtctttgcggcttcaactatcgctttaacagcttttaccgagatcagccgcatccatttattgtgagtgttgagggtgcactggatgaagtaatgaacaagctgcagcgagcaaatccagacgacccagcttatgatgaaaacaagcgccagtgtcaagaagacatcaaggtgatgaacgactatgtcgataaaattattgcagatcgcaaagcaaggggtgaacaaagccatgatttattaacgcagatgctaaacggaaaagatccagaaacgggtgagccgcttgatgacgggaacattcgttatcaaattattacattcttaattgcgggacacgaaacaacaagtggtcttttatcatttgcgctgtatttcttagtgaaaaatccacatgtattacaaaaagtagcagaagaagcagcacgagttctagtagatcctgttccaagctacaaacaagtcaaacagcttaaatatgtcggcatggtcttaaacgaagcgctgcgcttatggccaactgctcctgcgttttccctatatgcaaaagaagatacggtgcttggaggagaatatcctttaaccaaaggcgacgaagtaatggttctgattcctcagcttcaccgtgataaaacaatttggggagacgatgtggaggagttccgtccagagcgttttgaaaatccaagtgcgattccgcagcatgcgtttaaaccgtttggaaacggtcagcgtgcgtgtatcggttggcagttcgctcttcatgaagcaaccctggtacttggtatgatgctaaaacactttgactttgaagatcatacaaactacgagctcgttattaaagaaaagttaacgttaaaacctgaaggctttgtggtaaaagcaaaatcgaaaggcattccgcttggcctgattccttcacctagcactgaacagtctgctaaaaaagtacgcaaaaaggcagaaaacgctcataatacgccgctgcttgtgctatacggttcaaatgcgggaacagctgaaggaacggcgcgtgatttagcagatattgcaatgagcaaaggatttgcaccgcaggtcgcaacgcttgattcacacgccggaaatcttccgcgcgaaggagctgtattaattgtaacggcgtcttataacggtcatccgcctgataacgcaaagcaatttgtcgactggttagaccaagcgtctgctgatgaagtaaaaggcgttcgctactccgtatttggatgcggcgataaaaactgggctgcgacgtatcaaaaagtgcctgcttttatcgatgaaacgcttgccgctaaaggggcagaaaacatcgctgaccgcggtgaagcagatgcaagcgacgactttgaaggcgcgtatgaagaatggagtgatcatatgtggagtgacgtagcagcctactttaacctcgacattgaaaacagtgaagataataaatctactctttcacttcaatttgtcgacagcgccgcggatatgccgcttgcgaaaatgcacggtgcgttttcaacgaacgtcgtagcaagcaaagaacttcaacagccaggcagtgcacgaagcacgcgacatcttgaaattgaacttccaaaagaagcttcttatcaagaaggagatcatttaggtgttattcctcgcaactatgaaggaatagtaaaccgtgtaacagcaaggttcggcctaagcgcatcacagcaaatccgtctggaagcagaagaagaaaaattagctcatttgccactcgctaaaacagtatccgtagaagagcttctgcaatacgtggagcttcaagatcctgttacgcgcacgcagcttcgcgcaatggctgctaaaacggtctgcccgccgcataaagtagagcttgaagccttgcttgaaaagcaagcctacaaagaacaagtgctggcaaaacgtttaacaatgcttgaactgcttgaaaaatacccggcgtgtgaaatgaaattcagcgaatttatcgcccttctgccaagcatacgcccgcgctattactcgatttcttcatcacctcgtgtcgatgaaaaacaagcaagcatcacggtcagcgttgtctcaggaccggcgtggagcggatatggagaatataaaggaattgcgtcgaactatcttgccgagctgcaagaaggagatacgattacgtgctttatttccacagatcagtcagaatttacgctgccaaaagaccctgaaacgccgcttatcatggtcggaccgggaacaggcgtcgcgccgtttagaggctttgtgcaggcgcgcaaacagctaaaagaacaaggacagtcacttggagaagcacatttatacttcggctgccgttcacctcatgaagactatctgtatcaagaagagcttgaaaacgcccaaagcgaaggcatcattacgcttcataccgctttttctcgcatgccaaatcagccgaaaacatacgttcagcacgtaatggaacaagacggcaagaaattgattgaacttcttgatcaaggagcgcacttctatatttgcggagacggaagccaaatggcacctgccgttgaagcaacgcttatgaaaagctatgctgacgttcaccaagtgagtgaagcagacgctcgcttatggctgcagcagctagaagaaaaaggccgatacgcaaaagacgtgtgggctggg

SEQ ID NO: 684 - protein, 1049 aa, synthetic construct
  REGION 1..1049: note = Variant of cytochrome P450
MTIKEMPQPKTFGELKNLPLLNTDKPVQALMRIADELGEIFKFEAPGSVTRFLSSQRLIKEACDESRFDKNLSQGLKFARDFLGDGLFTSWTHEPNWKKAHNILGPSFSQLAMGRYHAMMVDIAVQLVQKWERLNADEHIEVSEDMTRLTLDTIGLCGFNYRFNSFYRDQPHPFIVSVEGALDEVMNKLQRANPDDPAYDENKRQCQEDIKVMNDYVDKIIADRKARGEQSHDLLTQMLNGKDPETGEPLDDGNIRYQIITFLIAGHETTSGLLSFALYFLVKNPHVLQKVAEEAARVLVDPVPSYKQVKQLKYVGMVLNEALRLWPTAPAFSLYAKEDTVLGGEYPLTKGDEVMVLIPQLHRDKTIWGDDVEEFRPERFENPSAIPQHAFKPFGNGQRACIGWQFALHEATLVLGMMLKHFDFEDHTNYELVIKEKLTLKPEGFVVKAKSKGIPLGLIPSPSTEQSAKKVRKKAENAHNTPLLVLYGSNAGTAEGTARDLADIAMSKGFAPQVATLDSHAGNLPREGAVLIVTASYNGHPPDNAKQFVDWLDQASADEVKGVRYSVFGCGDKNWAATYQKVPAFIDETLAAKGAENIADRGEADASDDFEGAYEEWSDHMWSDVAAYFNLDIENSEDNKSTLSLQFVDSAADMPLAKMHGAFSTNVVASKELQQPGSARSTRHLEIELPKEASYQEGDHLGVIPRNYEGIVNRVTARFGLSASQQIRLEAEEEKLAHLPLAKTVSVEELLQYVELQDPVTRTQLRAMAAKTVCPPHKVELEALLEKQAYKEQVLAKRLTMLELLEKYPACEMKFSEFIALLPSIRPRYYSISSSPRVDEKQASITVSVVSGPAWSGYGEYKGIASNYLAELQEGDTITCFISTDQSEFTLPKDPETPLIMVGPGTGVAPFRGFVQARKQLKEQGQSLGEAHLYFGCRSPHEDYLYQEELENAQSEGIITLHTAFSRMPNQPKTYVQHVMEQDGKKLIELLDQGAHFYICGDGSQMAPAVEATLMKSYADVHQVSEADARLWLQQLEEKGRYAKDVWAG

SEQ ID NO: 685 - DNA, 3147 bp, synthetic construct
  misc_feature 1..3147: note = Variant of cytochrome P450
  source 1..3147: mol_type = other DNA
atgacaattaaggaaatgcctcagcctaagacgtttggagaacttaaaaatttaccgttattaaacacagataaaccggttcaagctttgatgcgtattgcggatgaattaggagaaatctttaaattcgaggcgcctggtagcgtaacgcgctttttatcaagtcagcgtctaattaaagaagcatgcgatgaaagccgctttgataaaaacttaagtcaaggccttaaatttgcacgtgattttcttggagacgggttatttacaagctggacgcatgaaccgaattggaaaaaagcgcataatatcttaggcccaagctttagtcagctggcaatgaagcgttatcatgcgatgatggtcgatatcgccgtgcagcttgttcaaaagtgggagcgtctaaatgcagatgagcatattgaagtatcggaagacatgacacgtttaacgctggatacaattggtctttgcggcttcaactatcgctttaacagcttttaccgagatcagcctcatccatttattgtgagtgttgagggtgcactggatgaagtaatgaacaagctgcagcgagcaaatccagacgacccagcttatgatgaaaacaagcgccagtgtcaagaagacatcaaggtgatgaacgactatgtcgataaaattattgcagatcgcaaagcaaggggtgaacaaagccatgatttattaacgcagatgctaaacggaaaagatccagaaacgggtgagccgcttgatgacgggaacattcgttatcaaattctgacattcttaattgcgggacacgaaacaacaagtggtcttttatcatttgcgctgtatttcttagtgaaaaatccacatgtattacaaaaagtagcagaagaagcagcacgagttctagtagatcctgttccaagctacaaacaagtcaaacagcttaaatatgtcggcatggtcttaaacgaagcgctgcgcttatggccaactgctcctgcgttttccctatatgcaaaagaagatacggtacttggaggagaatatcctttaaccaaaggcgacgaagtaatggttctgattcctcagcttcaccgtgataaaacaatttggggagacgattatgaggaattccgtccagagcgttttgaaaatccaagtgcgattccgcagcatgcgtttaaaccgtttggaaacggtcagcgtgcgtgtatcggttggcagttcgctcttcatgaagcaaccctggtacttggtatgatgctaaaacactttgactttgaagatcatacaaactacgagctcgttattaaagaaaagttaacgttaaaacctgaaggctttgtggtaaaagcaaaatcgaaaggcattccgcttggcctgattccttcacctagcactgaacagtctgctaaaaaagtacgcaaaaaggcagaaaacgctcataatacgccgctgcttgtgctatacggttcaaatgcgggaacagctgaaggaacggcgcgtgatttagcagatattgcaatgagcaaaggatttgcaccgcaggtcgcaacgcttgattcacacgccggaaatcttccgcgcgaaggagctgtattaattgtaacggcgtcttataacggtcatccgcctgataacgcaaagcagtttgtcgactggttagaccaagcgtctgctgatgaagtaaaaggcgttcgctactccgtatttggatgcggcgataaaaactgggctgcgacgtatcaaaaagtgcctgcttttatcgatgaaacgcttgccgctaaaggggcagaaaacatcgctgaccgcggtgaagcagatgcaagcgacgactttgaaggcgcgtatgaagaatggagtgatcatatgtggagtgacgtagcagcctactttaacctcgacattgaaaacagtgaagataataaatctactctttcacttcaatttgtcgacagcgccgcggatatgccgcttgcgaaaatgcacggtgcgttttcaacgaacgtcgtagcaagcaaagaacttcaacagccaggcagtgcacgaagcacgcgacatcttgaaattgaacttccaaaagaagcttcttatcaagaaggagatcatttaggtgttattcctcgcaactatgaaggaatagtaaaccgtgtaacagcaaggttcggcctaagcgcatcacagcaaatccgtctggaagcagaagaagaaaaattagctcatttgccactcgctaaaacagtatccgtagaagagcttctgcaatacgtggagcttcaagatcctgttacgcgcacgcagcttcgcgcaatggctgctaaaacggtctgcccgccgcataaagtagagcttgaagccttgcttgaaaagcaagcctacaaagaacaagtgctggcaaaacgtttaacaatgcttgaactgcttgaaaaatacccggcgtgtgaaatgaaattcagcgaatttatcgcccttctgccaagcatacgcccgcgctattactcgatttcttcatcacctcgtgtcgatgaaaaacaagcaagcatcacggtcagcgttgtctcaggaccggcgtggagcggatatggagaatataaaggaattgcgtcgaactatcttgccgagctgcaagaaggagatacgattacgtgctttatttccacagatcagtcagaatttacgctgccaaaagaccctgaaacgccgcttatcatggtcggaccgggaacaggcgtcgcgccgtttagaggctttgtgcaggcgcgcaaacagctaaaagaacaaggacagtcacttggagaagcacatttatacttcggctgccgttcacctcatgaagactatctgtatcaagaagagcttgaaaacgcccaaagcgaaggcatcattacgcttcataccgctttttctcgcatgccaaatcagccgaaaacatacgttcagcacgtaatggaacaagacggcaagaaattgattgaacttcttgatcaaggagcgcacttctatatttgcggagacggaagccaaatggcacctgccgttgaagcaacgcttatgaaaagctatgctgacgttcaccaagtgagtgaagcagacgctcgcttatggctgcagcagctagaagaaaaaggccgatacgcaaaagacgtgtgggctggg

SEQ ID NO: 686 - protein, 1049 aa, synthetic construct
  REGION 1..1049: note = Variant of cytochrome P450
MTIKEMPQPKTFGELKNLPLLNTDKPVQALMRIADELGEIFKFEAPGSVTRFLSSQRLIKEACDESRFDKNLSQGLKFARDFLGDGLFTSWTHEPNWKKAHNILGPSFSQLAMKRYHAMMVDIAVQLVQKWERLNADEHIEVSEDMTRLTLDTIGLCGFNYRFNSFYRDQPHPFIVSVEGALDEVMNKLQRANPDDPAYDENKRQCQEDIKVMNDYVDKIIADRKARGEQSHDLLTQMLNGKDPETGEPLDDGNIRYQILTFLIAGHETTSGLLSFALYFLVKNPHVLQKVAEEAARVLVDPVPSYKQVKQLKYVGMVLNEALRLWPTAPAFSLYAKEDTVLGGEYPLTKGDEVMVLIPQLHRDKTIWGDDYEEFRPERFENPSAIPQHAFKPFGNGQRACIGWQFALHEATLVLGMMLKHFDFEDHTNYELVIKEKLTLKPEGFVVKAKSKGIPLGLIPSPSTEQSAKKVRKKAENAHNTPLLVLYGSNAGTAEGTARDLADIAMSKGFAPQVATLDSHAGNLPREGAVLIVTASYNGHPPDNAKQFVDWLDQASADEVKGVRYSVFGCGDKNWAATYQKVPAFIDETLAAKGAENIADRGEADASDDFEGAYEEWSDHMWSDVAAYFNLDIENSEDNKSTLSLQFVDSAADMPLAKMHGAFSTNVVASKELQQPGSARSTRHLEIELPKEASYQEGDHLGVIPRNYEGIVNRVTARFGLSASQQIRLEAEEEKLAHLPLAKTVSVEELLQYVELQDPVTRTQLRAMAAKTVCPPHKVELEALLEKQAYKEQVLAKRLTMLELLEKYPACEMKFSEFIALLPSIRPRYYSISSSPRVDEKQASITVSVVSGPAWSGYGEYKGIASNYLAELQEGDTITCFISTDQSEFTLPKDPETPLIMVGPGTGVAPFRGFVQARKQLKEQGQSLGEAHLYFGCRSPHEDYLYQEELENAQSEGIITLHTAFSRMPNQPKTYVQHVMEQDGKKLIELLDQGAHFYICGDGSQMAPAVEATLMKSYADVHQVSEADARLWLQQLEEKGRYAKDVWAG

SEQ ID NO: 687 - DNA, 3147 bp, synthetic construct
  misc_feature 1..3147: note = Variant of cytochrome P450
  source 1..3147: mol_type = other DNA
atgacaattaaggaaatgcctcagcctaagacgtttggagaacttaaaaatttaccgttattaaacacagataaaccggttcaagctttgatgcgtattgcggatgaattaggagaaatctttaaattcgaggcgcctggtagcgtaacgcgctttttatcaagtcagcgtctaattaaagaagcatgcgatgaacgccgctttgataaaaacttaagtcaaggccttaaatttgcacgtgattttcttggagacgggttatttacaagctggacgcatgaaccgaattggaaaaaagcgcataatatcttaggcccaagctttagtcagctggcaatgaagcgttatcatgcgatgatggtcgatatcgccgtgcagcttgttcaaaagtgggagcgtctaaatgcagatgagcatattgaagtatcggaagacatgacacgtttaacgctggatacaattggtctttgcggcttcaactatcgctttaacagcttttaccgagatcagccgcatccatttattgtgagtgttgagggtgcactggatgaagtaatgaacaagctgcagcgagcaaatccagacgacccagcttatgatgaaaacaagcgccagtgtcaagaagacatcaaggtgatgaacgactatgtcgataaaattattgcagatcgcaaagcaaggggtgaacaaagccatgatttattaacgcagatgctaaacggaaaagatccagaaacgggtgagccgcttgatgacgggaacattcgttatcaaattattacattcttaattgcgggacacgaaacaacaagtggtcttttatcatttgcgctgtatttcttagtgaaaaatccacatgtattacaaaaagtagcagaagaagcagcacgagttctagtagatcctgttccaagctacaaacaagtcaaacagcttaaatatgtcggcatggtcttaaacgaagcgctgcgcttatggccaactgctcctgcgttttccctatatgcaaaagaagatacggtgcttggaggagaatatcctttaaccaaaggcgacgaagtaatggttctgattcctcagcttcaccgtgataaaacaatttggggagacgatgtggaggagttccgtccagagcgttttgaaaatccaagtgcgattccgcagcatgcgtttaaaccgtttggaaacggtcagcgtgcgtgtatcggttggcagttcgctcttcatgaagcaacgctggtacttggtatgatgctaaaacactttgactttgaagatcatacaaactacgagctcgttattaaagaaatgttaacgttaaaacctgaaggctttgtggtaaaagcaaaatcgaaaggcattccgcttggcctgattccttcacctagcactgaacagtctgctaaaaaagtacgcaaaaaggcagaaaacgctcataatacgccgctgcttgtgctatacggttcaaatgcgggaacagctgaaggaacggcgcgtgatttagcagatattgcaatgagcaaaggatttgcaccgcaggtcgcaacgcttgattcacacgccggaaatcttccgcgcgaaggagctgtattaattgtaacggcgtcttataacggtcatccgcctgataacgcaaagcaatttgtcgactggttagaccaagcgtctgctgatgaagtaaaaggcgttcgctactccgtatttggatgcggcgataaaaactgggctgcgacgtatcaaaaagtgcctgcttttatcgatgaaacgcttgccgctaaaggggcagaaaacatcgctgaccgcggtgaagcagatgcaagcgacgactttgaaggcgcgtatgaagaatggagtgatcatatgtggagtgacgtagcagcctactttaacctcgacattgaaaacagtgaagataataaatctactctttcacttcaatttgtcgacagcgccgcggatatgccgcttgcgaaaatgcacggtgcgttttcaacgaacgtcgtagcaagcaaagaacttcaacagccaggcagtgcacgaagcacgcgacatcttgaaattgaacttccaaaagaagcttcttatcaagaaggagatcatttaggtgttattcctcgcaactatgaaggaatagtaaaccgtgtaacagcaaggttcggcctaagcgcatcacagcaaatccgtctggaagcagaagaagaaaaattagctcatttgccactcgctaaaacagtatccgtagaagagcttctgcaatacgtggagcttcaagatcctgttacgcgcacgcagcttcgcgcaatggctgctaaaacggtctgcccgccgcataaagtagagcttgaagccttgcttgaaaagcaagcctacaaagaacaagtgctggcaaaacgtttaacaatgcttgaactgcttgaaaaatacccggcgtgtgaaatgaaattcagcgaatttatcgcccttctgccaagcatacgcccgcgctattactcgatttcttcatcacctcgtgtcgatgaaaaacaagcaagcatcacggtcagcgttgtctcaggaccggcgtggagcggatatggagaatataaaggaattgcgtcgaactatcttgccgagctgcaagaaggagatacgattacgtgctttatttccacagatcagtcagaatttacgctgccaaaagaccctgaaacgccgcttatcatggtcggaccgggaacaggcgtcgcgccgtttagaggctttgtgcaggcgcgcaaacagctaaaagaacaaggacagtcacttggagaagcacatttatacttcggctgccgttcacctcatgaagactatctgtatcaagaagagcttgaaaacgcccaaagcgaaggcatcattacgcttcataccgctttttctcgcatgccaaatcagccgaaaacatacgttcagcacgtaatggaacaagacggcaagaaattgattgaacttcttgatcaaggagcgcacttctatatttgcggagacggaagccaaatggcacctgccgttgaagcaacgcttatgaaaagctatgctgacgttcaccaagtgagtgaagcagacgctcgcttatggctgcagcagctagaagaaaaaggccgatacgcaaaagacgtgtgggctggg

SEQ ID NO: 688 - protein, 1049 aa, synthetic construct
  REGION 1..1049: note = Variant of cytochrome P450
MTIKEMPQPKTFGELKNLPLLNTDKPVQALMRIADELGEIFKFEAPGSVTRFLSSQRLIKEACDERRFDKNLSQGLKFARDFLGDGLFTSWTHEPNWKKAHNILGPSFSQLAMKRYHAMMVDIAVQLVQKWERLNADEHIEVSEDMTRLTLDTIGLCGFNYRFNSFYRDQPHPFIVSVEGALDEVMNKLQRANPDDPAYDENKRQCQEDIKVMNDYVDKIIADRKARGEQSHDLLTQMLNGKDPETGEPLDDGNIRYQIITFLIAGHETTSGLLSFALYFLVKNPHVLQKVAEEAARVLVDPVPSYKQVKQLKYVGMVLNEALRLWPTAPAFSLYAKEDTVLGGEYPLTKGDEVMVLIPQLHRDKTIWGDDVEEFRPERFENPSAIPQHAFKPFGNGQRACIGWQFALHEATLVLGMMLKHFDFEDHTNYELVIKEMLTLKPEGFVVKAKSKGIPLGLIPSPSTEQSAKKVRKKAENAHNTPLLVLYGSNAGTAEGTARDLADIAMSKGFAPQVATLDSHAGNLPREGAVLIVTASYNGHPPDNAKQFVDWLDQASADEVKGVRYSVFGCGDKNWAATYQKVPAFIDETLAAKGAENIADRGEADASDDFEGAYEEWSDHMWSDVAAYFNLDIENSEDNKSTLSLQFVDSAADMPLAKMHGAFSTNVVASKELQQPGSARSTRHLEIELPKEASYQEGDHLGVIPRNYEGIVNRVTARFGLSASQQIRLEAEEEKLAHLPLAKTVSVEELLQYVELQDPVTRTQLRAMAAKTVCPPHKVELEALLEKQAYKEQVLAKRLTMLELLEKYPACEMKFSEFIALLPSIRPRYYSISSSPRVDEKQASITVSVVSGPAWSGYGEYKGIASNYLAELQEGDTITCFISTDQSEFTLPKDPETPLIMVGPGTGVAPFRGFVQARKQLKEQGQSLGEAHLYFGCRSPHEDYLYQEELENAQSEGIITLHTAFSRMPNQPKTYVQHVMEQDGKKLIELLDQGAHFYICGDGSQMAPAVEATLMKSYADVHQVSEADARLWLQQLEEKGRYAKDVWAG

SEQ ID NO: 689 - DNA, 3147 bp, synthetic construct
  misc_feature 1..3147: note = Variant of cytochrome P450
  source 1..3147: mol_type = other DNA
atgacaattaaggaaatgcctcagcctaagacgtttggagaacttaaaaatttaccgttattaaacacagataaaccggttcaagctttgatgcgtattgcggatgaattaggagaaatctttaaattcgaggcgcctggtagcgtaacgcgctttttatcaagtcagcgtctaattaaagaagcatgcgatgaaagccgctttgataaaaacttaagtcaaggccttaaatttgcacgtgattttcttggagacgggttatttacaagctggacgcatgaaccgaattggaaaaaagcgcataatatcttaggcccaagctttagtcagcacgcaatgggccgttatcatgcgatgatggtcgatatcgccgtgcagcttgttcaaaagtgggagcgtctaaatgcagatgagcatattgaagtatcggaagacatgacacgtttaacgctggatacaattggtctttgcggcttcaactatcgctttaacagcttttaccgagatcagccgcatccatttattgtgagtgttgagggtgcactggatgaagtaatgaacaagctgcagcgagcaaatccagacgacccagcttatgatgaaaacaagcgccagtgtcaagaagacatcaaggtgatgaacgactatgtcgataaaattattgcagatcgcaaagcaaggggtgaacaaagccatgatttattaacgcagatgctaaacggaaaagatccagaaacgggtgagccgcttgatgacgggaacattcgttatcaaattattacattcttaattgcgggacacgaaacaacaagtggtcttttatcatttgcgctgtatttcttagtgaaaaatccacatgtattacaaaaagtagcagaagaagcagcacgagttctagtagatcctgttccaagctacaaacaagtcaaacagcttaaatatgtcggcatggtcttaaacgaagcgctgcgcttatggccaactgctcctgcgttttccctatatgcaaaagaagatacggtacttggaggagaatatcctttaaccaaaggcgacgaagtaatggttctgattcctcagcttcaccgtgataaaacaatttggggagacgatgtggaggagttccgtccagagcgttttgaaaatccaagtgcgattccgcagcatgcgtttaaaccgtttggaaacggtcagcgtgcgtgtatcggttggcagttcgctcttcatgaagcaacgctggtacttggtatgatgctaaaacactttgactttgaagatcatacaaactacgagctcgttattaaagaaaagttaacgttaaaacctgaaggctttgtggtaaaagcaaaatcgaaaggcattccgcttggcctgattccttcacctagcactgaacagtctgctaaaaaagtacgcaaaaaggcagaaaacgctcataatacgccgctgcttgtgctatacggttcaaatgcgggaacagctgaaggaacggcgcgtgatttagcagatattgcaatgagcaaaggatttgcaccgcaggtcgcaacgcttgattcacacgccggaaatcttccgcgcgaaggagctgtattaattgtaacggcgtcttataacggtcatccgcctgataacgcaaagcagtttgtcgactggttagaccaagcgtctgctgatgaagtaaaaggcgttcgctactccgtatttggatgcggcgataaaaactgggctgcgacgtatcaaaaagtgcctgcttttatcgatgaaacgcttgccgctaaaggggcagaaaacatcgctgaccgcggtgaagcagatgcaagcgacgactttgaaggcgcgtatgaagaatggagtgatcatatgtggagtgacgtagcagcctactttaacctcgacattgaaaacagtgaagataataaatctactctttcacttcaatttgtcgacagcgccgcggatatgccgcttgcgaaaatgcacggtgcgttttcaacgaacgtcgtagcaagcaaagaacttcaacagccaggcagtgcacgaagcacgcgacatcttgaaattgaacttccaaaagaagcttcttatcaagaaggagatcatttaggtgttattcctcgcaactatgaaggaatagtaaaccgtgtaacagcaaggttcggcctaagcgcatcacagcaaatccgtctggaagcagaagaagaaaaattagctcatttgccactcgctaaaacagtatccgtagaagagcttctgcaatacgtggagcttcaagatcctgttacgcgcacgcagcttcgcgcaatggctgctaaaacggtctgcccgccgcataaagtagagcttgaagccttgcttgaaaagcaagcctacaaagaacaagtgctggcaaaacgtttaacaatgcttgaactgcttgaaaaatacccggcgtgtgaaatgaaattcagcgaatttatcgcccttctgccaagcatacgcccgcgctattactcgatttcttcatcacctcgtgtcgatgaaaaacaagcaagcatcacggtcagcgttgtctcaggaccggcgtggagcggatatggagaatataaaggaattgcgtcgaactatcttgccgagctgcaagaaggagatacgattacgtgctttatttccacagatcagtcagaatttacgctgccaaaagaccctgaaacgccgcttatcatggtcggaccgggaacaggcgtcgcgccgtttagaggctttgtgcaggcgcgcaaacagctaaaagaacaaggacagtcacttggagaagcacatttatacttcggctgccgttcacctcatgaagactatctgtatcaagaagagcttgaaaacgcccaaagcgaaggcatcattacgcttcataccgctttttctcgcatgccaaatcagccgaaaacatacgttcagcacgtaatggaacaagacggcaagaaattgattgaacttcttgatcaaggagcgcacttctatatttgcggagacggaagccaaatggcacctgccgttgaagcaacgcttatgaaaagctatgctgacgttcaccaagtgagtgaagcagacgctcgcttatggctgcagcagctagaagaaaaaggccgatacgcaaaagacgtgtgggctggg

SEQ ID NO: 690 - protein, 1049 aa, synthetic construct
  REGION 1..1049: note = Variant of cytochrome P450
MTIKEMPQPKTFGELKNLPLLNTDKPVQALMRIADELGEIFKFEAPGSVTRFLSSQRLIKEACDESRFDKNLSQGLKFARDFLGDGLFTSWTHEPNWKKAHNILGPSFSQHAMGRYHAMMVDIAVQLVQKWERLNADEHIEVSEDMTRLTLDTIGLCGFNYRFNSFYRDQPHPFIVSVEGALDEVMNKLQRANPDDPAYDENKRQCQEDIKVMNDYVDKIIADRKARGEQSHDLLTQMLNGKDPETGEPLDDGNIRYQIITFLIAGHETTSGLLSFALYFLVKNPHVLQKVAEEAARVLVDPVPSYKQVKQLKYVGMVLNEALRLWPTAPAFSLYAKEDTVLGGEYPLTKGDEVMVLIPQLHRDKTIWGDDVEEFRPERFENPSAIPQHAFKPFGNGQRACIGWQFALHEATLVLGMMLKHFDFEDHTNYELVIKEKLTLKPEGFVVKAKSKGIPLGLIPSPSTEQSAKKVRKKAENAHNTPLLVLYGSNAGTAEGTARDLADIAMSKGFAPQVATLDSHAGNLPREGAVLIVTASYNGHPPDNAKQFVDWLDQASADEVKGVRYSVFGCGDKNWAATYQKVPAFIDETLAAKGAENIADRGEADASDDFEGAYEEWSDHMWSDVAAYFNLDIENSEDNKSTLSLQFVDSAADMPLAKMHGAFSTNVVASKELQQPGSARSTRHLEIELPKEASYQEGDHLGVIPRNYEGIVNRVTARFGLSASQQIRLEAEEEKLAHLPLAKTVSVEELLQYVELQDPVTRTQLRAMAAKTVCPPHKVELEALLEKQAYKEQVLAKRLTMLELLEKYPACEMKFSEFIALLPSIRPRYYSISSSPRVDEKQASITVSVVSGPAWSGYGEYKGIASNYLAELQEGDTITCFISTDQSEFTLPKDPETPLIMVGPGTGVAPFRGFVQARKQLKEQGQSLGEAHLYFGCRSPHEDYLYQEELENAQSEGIITLHTAFSRMPNQPKTYVQHVMEQDGKKLIELLDQGAHFYICGDGSQMAPAVEATLMKSYADVHQVSEADARLWLQQLEEKGRYAKDVWAG

SEQ ID NO: 691 - DNA, 3147 bp, synthetic construct
  misc_feature 1..3147: note = Variant of cytochrome P450
  source 1..3147: mol_type = other DNA
atgacaattaaggaaatgcctcagcctaagacgtttggagaacttaaaaatttaccgttattaaacacagataaaccggttcaagctttgatgcgtattgcggatgaattaggagaaatctttaaattcgaggcgcctggtagcgtaacgcgctttttatcaagtcagcgtctaattaaagaagcatgcgatgaacgccgctttgataaaaacttaagtcaaggccttaaatttgcacgtgattttcttggagacgggttatttacaagctggacgcatgaaccgaattggaaaaaagcgcataatatcttaggcccaagctttagtcagctggcaatgcgccgttatcatgcgatgatggtcgatatcgccgtgcagcttgttcaaaagtgggagcgtctaaatgcagatgagcatattgaagtatcggaagacatgacacgtttaacgctggatacaattggtctttgcggcttcaactatcgctttaacagcttttaccgagatcagcctcatccatttattgtgagtgttgagggtgcactggatgaagtaatgaacaagctgcagcgagcaaatccagacgacccagcttatgatgaaaacaagcgccagtgtcaagaagacatcaaggtgatgaacgactatgtcgataaaattattgcagatcgcaaagcaaggggtgaacaaagccatgatttattaacgcagatgctaaacggaaaagatccagcaacgggtgagccgcttgatgacgggaacattcgttatcaaattattacattcttaattgcgggacacgaaacaacaagtggtcttttatcatttgcgctgtatttcttagtgaaaaatccacatgtattacaaaaagtagcagaagaagcagcacgagttctagtagatcctgttccaagctacaaacaagtcaaacagcttaaatatgtcggcatggtcttaaacgaagcgctgcgcttatggccaactgctcctgcgttttccctatatgcaaaagaagatacggtgcttggaggagaatatcctttaaccaaaggcgacgaagtaatggttctgattcctcagcttcaccgtgataaaacaatttggggagacgatgtggaggagttccgtccagagcgttttgaaaatccaagtgcgattccgcagcatgcgtttaaaccgtttggaaacggtcagcgtgcgtgtatcggttggcagttcgctcttcatgaagcaacgctggtacttggtatgatgctaaaacactttgactttgaagatcatacaaactacgagctcgttattaaagaaaagttaacgttaaaacctgaaggctttgtggtaaaagcaaaatcgaaaggcattccgcttggcctgattccttcacctagcactgaacagtctgctaaaaaagtacgcaaaaaggcagaaaacgctcataatacgccgctgcttgtgctatacggttcaaatgcgggaacagctgaaggaacggcgcgtgatttagcagatattgcaatgagcaaaggatttgcaccgcaggtcgcaacgcttgattcacacgccggaaatcttccgcgcgaaggagctgtattaattgtaacggcgtcttataacggtcatccgcctgataacgcaaagcaatttgtcgactggttagaccaagcgtctgctgatgaagtaaaaggcgttcgctactccgtatttggatgcggcgataaaaactgggctgcgacgtatcaaaaagtgcctgcttttatcgatgaaacgcttgccgctaaaggggcagaaaacatcgctgaccgcggtgaagcagatgcaagcgacgactttgaaggcgcgtatgaagaatggagtgatcatatgtggagtgacgtagcagcctactttaacctcgacattgaaaacagtgaagataataaatctactctttcacttcaatttgtcgacagcgccgcggatatgccgcttgcgaaaatgcacggtgcgttttcaacgaacgtcgtagcaagcaaagaacttcaacagccaggcagtgcacgaagcacgcgacatcttgaaattgaacttccaaaagaagcttcttatcaagaaggagatcatttaggtgttattcctcgcaactatgaaggaatagtaaaccgtgtaacagcaaggttcggcctaagcgcatcacagcaaatccgtctggaagcagaagaagaaaaattagctcatttgccactcgctaaaacagtatccgtagaagagcttctgcaatacgtggagcttcaagatcctgttacgcgcacgcagcttcgcgcaatggctgctaaaacggtctgcccgccgcataaagtagagcttgaagccttgcttgaaaagcaagcctacaaagaacaagtgctggcaaaacgtttaacaatgcttgaactgcttgaaaaatacccggcgtgtgaaatgaaattcagcgaatttatcgcccttctgccaagcatacgcccgcgctattactcgatttcttcatcacctcgtgtcgatgaaaaacaagcaagcatcacggtcagcgttgtctcaggaccggcgtggagcggatatggagaatataaaggaattgcgtcgaactatcttgccgagctgcaagaaggagatacgattacgtgctttatttccacagatcagtcagaatttacgctgccaaaagaccctgaaacgccgcttatcatggtcggaccgggaacaggcgtcgcgccgtttagaggctttgtgcaggcgcgcaaacagctaaaagaacaaggacagtcacttggagaagcacatttatacttcggctgccgttcacctcatgaagactatctgtatcaagaagagcttgaaaacgcccaaagcgaaggcatcattacgcttcataccgctttttctcgcatgccaaatcagccgaaaacatacgttcagcacgtaatggaacaagacggcaagaaattgattgaacttcttgatcaaggagcgcacttctatatttgcggagacggaagccaaatggcacctgccgttgaagcaacgcttatgaaaagctatgctgacgttcaccaagtgagtgaagcagacgctcgcttatggctgcagcagctagaagaaaaaggccgatacgcaaaagacgtgtgggctggg

SEQ ID NO: 692 - protein, 1049 aa, synthetic construct
  REGION 1..1049: note = Variant of cytochrome P450
MTIKEMPQPKTFGELKNLPLLNTDKPVQALMRIADELGEIFKFEAPGSVTRFLSSQRLIKEACDERRFDKNLSQGLKFARDFLGDGLFTSWTHEPNWKKAHNILGPSFSQLAMRRYHAMMVDIAVQLVQKWERLNADEHIEVSEDMTRLTLDTIGLCGFNYRFNSFYRDQPHPFIVSVEGALDEVMNKLQRANPDDPAYDENKRQCQEDIKVMNDYVDKIIADRKARGEQSHDLLTQMLNGKDPATGEPLDDGNIRYQIITFLIAGHETTSGLLSFALYFLVKNPHVLQKVAEEAARVLVDPVPSYKQVKQLKYVGMVLNEALRLWPTAPAFSLYAKEDTVLGGEYPLTKGDEVMVLIPQLHRDKTIWGDDVEEFRPERFENPSAIPQHAFKPFGNGQRACIGWQFALHEATLVLGMMLKHFDFEDHTNYELVIKEKLTLKPEGFVVKAKSKGIPLGLIPSPSTEQSAKKVRKKAENAHNTPLLVLYGSNAGTAEGTARDLADIAMSKGFAPQVATLDSHAGNLPREGAVLIVTASYNGHPPDNAKQFVDWLDQASADEVKGVRYSVFGCGDKNWAATYQKVPAFIDETLAAKGAENIADRGEADASDDFEGAYEEWSDHMWSDVAAYFNLDIENSEDNKSTLSLQFVDSAADMPLAKMHGAFSTNVVASKELQQPGSARSTRHLEIELPKEASYQEGDHLGVIPRNYEGIVNRVTARFGLSASQQIRLEAEEEKLAHLPLAKTVSVEELLQYVELQDPVTRTQLRAMAAKTVCPPHKVELEALLEKQAYKEQVLAKRLTMLELLEKYPACEMKFSEFIALLPSIRPRYYSISSSPRVDEKQASITVSVVSGPAWSGYGEYKGIASNYLAELQEGDTITCFISTDQSEFTLPKDPETPLIMVGPGTGVAPFRGFVQARKQLKEQGQSLGEAHLYFGCRSPHEDYLYQEELENAQSEGIITLHTAFSRMPNQPKTYVQHVMEQDGKKLIELLDQGAHFYICGDGSQMAPAVEATLMKSYADVHQVSEADARLWLQQLEEKGRYAKDVWAG

SEQ ID NO: 693 - DNA, 3147 bp, synthetic construct
  misc_feature 1..3147: note = Variant of cytochrome P450
  source 1..3147: mol_type = other DNA
atgacaattaaggaaatgcctcagcctaagacgtttggagaacttaaaaatttaccgttattaaacacagataaaccggttcaagctttgatgcgtattgcggatgaattaggagaaatctttaaattcgaggcgcctggtagcgtaacgcgctttttatcaagtcagcgtctaattaaagaagcatgcgatgaacgccgctttgataaaaacttaagtcaaggccttaaatttgcacgtgattttcttggagacgggttatttacaagctggacgcatgaaccgaattggaaaaaagcgcataatatcttaggcccaagctttagtcagcacgcaatgaagcgttatcatgcgatgatggtcgatatcgccgtgcagcttgttcaaaagtgggagcgtctaaatgcagatgagcatattgaagtatcggaagacatgacacgtttaacgctggatacaattggtctttgcggcttcaactatcgctttaacagcttttaccgagatcagccgcatccatttattgtgagtgttgagggtgcactggatgaagtaatgaacaagctgcagcgagcaaatccagacgacccagcttatgatgaaaacaagcgccagtgtcaagaagacatcaaggtgatgaacgactatgtcgataaaattattgcagatcgcaaagcaaggggtgaacaaagccatgatttattaacgcagatgctaaacggaaaagatccagaaacgggtgagccgcttgatgacgggaacattcgttatcaaattattacattcttaattgcgggacacgaaacaacaagtggtcttttatcatttgcgctgtatttcttagtgaaaaatccacatgtattacaaaaagtagcagaagaagcagcacgagttctagtagatcctgttccaagctacaaacaagtcaaacagcttaaatatgtcggcatggtcttaaacgaagcgctgcgcttatggccaactgctcctgcgttttccctatatgcaaaagaagatacggtgcttggaggagaatatcctttaaccaaaggcgacgaagtaatggttctgattcctcagcttcaccgtgataaaacaatttggggagacgattatgaggaattccgtccagagcgttttgaaaatccaagtgcgattccgcagcatgcgtttaaaccgtttggaaacggtcagcgtgcgtgtatcggttggcagttcgctcttcatgaagcaacgctggtacttggtatgatgctaaaacactttgactttgaagatcatacaaactacgagctcgttattaaagaaaagttaacgttaaaacctgaaggctttgtggtaaaagcaaaatcgaaaggcattccgcttggcctgattccttcacctagcactgaacagtctgctaaaaaagtacgcaaaaaggcagaaaacgctcataatacgccgctgcttgtgctatacggttcaaatgcgggaacagctgaaggaacggcgcgtgatttagcagatattgcaatgagcaaaggatttgcaccgcaggtcgcaacgcttgattcacacgccggaaatcttccgcgcgaaggagctgtattaattgtaacggcgtcttataacggtcatccgcctgataacgcaaagagttttgtcgactggttagaccaagcgtctgctgatgaagtaaaaggcgttcgctactccgtatttggatgcggcgataaaaactgggctgcgacgtatcaaaaagtgcctgcttttatcgatgaaacgcttgccgctaaaggggcagaaaacatcgctgaccgcggtgaagcagatgcaagcgacgactttgaaggcgcgtatgaagaatggagtgatcatatgtggagtgacgtagcagcctactttaacctcgacattgaaaacagtgaagataataaatctactctttcacttcaatttgtcgacagcgccgcggatatgccgcttgcgaaaatgcacggtgcgttttcaacgaacgtcgtagcaagcaaagaacttcaacagccaggcagtgcacgaagcacgcgacatcttgaaattgaacttccaaaagaagcttcttatcaagaaggagatcatttaggtgttattcctcgcaactatgaaggaatagtaaaccgtgtaacagcaaggttcggcctaagcgcatcacagcaaatccgtctggaagcagaagaagaaaaattagctcatttgccactcgctaaaacagtatccgtagaagagcttctgcaatacgtggagcttcaagatcctgttacgcgcacgcagcttcgcgcaatggctgctaaaacggtctgcccgccgcataaagtagagcttgaagccttgcttgaaaagcaagcctacaaagaacaagtgctggcaaaacgtttaacaatgcttgaactgcttgaaaaatacccggcgtgtgaaatgaaattcagcgaatttatcgcccttctgccaagcatacgcccgcgctattactcgatttcttcatcacctcgtgtcgatgaaaaacaagcaagcatcacggtcagcgttgtctcaggaccggcgtggagcggatatggagaatataaaggaattgcgtcgaactatcttgccgagctgcaagaaggagatacgattacgtgctttatttccacagatcagtcagaatttacgctgccaaaagaccctgaaacgccgcttatcatggtcggaccgggaacaggcgtcgcgccgtttagaggctttgtgcaggcgcgcaaacagctaaaagaacaaggacagtcacttggagaagcacatttatacttcggctgccgttcacctcatgaagactatctgtatcaagaagagcttgaaaacgcccaaagcgaaggcatcattacgcttcataccgctttttctcgcatgccaaatcagccgaaaacatacgttcagcacgtaatggaacaagacggcaagaaattgattgaacttcttgatcaaggagcgcacttctatatttgcggagacggaagccaaatggcacctgccgttgaagcaacgcttatgaaaagctatgctgacgttcaccaagtgagtgaagcagacgctcgcttatggctgcagcagctagaagaaaaaggccgatacgcaaaagacgtgtgggctggg

SEQ ID NO: 694 - protein, 1049 aa, synthetic construct
  REGION 1..1049: note = Variant of cytochrome P450
MTIKEMPQPKTFGELKNLPLLNTDKPVQALMRIADELGEIFKFEAPGSVTRFLSSQRLIKEACDERRFDKNLSQGLKFARDFLGDGLFTSWTHEPNWKKAHNILGPSFSQHAMKRYHAMMVDIAVQLVQKWERLNADEHIEVSEDMTRLTLDTIGLCGFNYRFNSFYRDQPHPFIVSVEGALDEVMNKLQRANPDDPAYDENKRQCQEDIKVMNDYVDKIIADRKARGEQSHDLLTQMLNGKDPETGEPLDDGNIRYQIITFLIAGHETTSGLLSFALYFLVKNPHVLQKVAEEAARVLVDPVPSYKQVKQLKYVGMVLNEALRLWPTAPAFSLYAKEDTVLGGEYPLTKGDEVMVLIPQLHRDKTIWGDDYEEFRPERFENPSAIPQHAFKPFGNGQRACIGWQFALHEATLVLGMMLKHFDFEDHTNYELVIKEKLTLKPEGFVVKAKSKGIPLGLIPSPSTEQSAKKVRKKAENAHNTPLLVLYGSNAGTAEGTARDLADIAMSKGFAPQVATLDSHAGNLPREGAVLIVTASYNGHPPDNAKSFVDWLDQASADEVKGVRYSVFGCGDKNWAATYQKVPAFIDETLAAKGAENIADRGEADASDDFEGAYEEWSDHMWSDVAAYFNLDIENSEDNKSTLSLQFVDSAADMPLAKMHGAFSTNVVASKELQQPGSARSTRHLEIELPKEASYQEGDHLGVIPRNYEGIVNRVTARFGLSASQQIRLEAEEEKLAHLPLAKTVSVEELLQYVELQDPVTRTQLRAMAAKTVCPPHKVELEALLEKQAYKEQVLAKRLTMLELLEKYPACEMKFSEFIALLPSIRPRYYSISSSPRVDEKQASITVSVVSGPAWSGYGEYKGIASNYLAELQEGDTITCFISTDQSEFTLPKDPETPLIMVGPGTGVAPFRGFVQARKQLKEQGQSLGEAHLYFGCRSPHEDYLYQEELENAQSEGIITLHTAFSRMPNQPKTYVQHVMEQDGKKLIELLDQGAHFYICGDGSQMAPAVEATLMKSYADVHQVSEADARLWLQQLEEKGRYAKDVWAG

SEQ ID NO: 695 - DNA, 3147 bp, synthetic construct
  misc_feature 1..3147: note = Variant of cytochrome P450
  source 1..3147: mol_type = other DNA
atgacaattaaggaaatgcctcagcctaagacgtttggagaacttaaaaatttaccgttattaaacacagataaaccggttcaagctttgatgcgtattgcggatgaattaggagaaatctttaaattcgaggcgcctggtagcgtaacgcgctttttatcaagtcagcgtctaattaaagaagcatgcgatgaacgccgctttgataaaaacttaagtcaaggccttaaatttgcacgtgattttcttggagacgggttatttacaagctggacgcatgaaccgaattggaaaaaagcgcataatatcttaggcccaagctttagtcagctggcaatgggccgttatcatgcgatgatggtcgatatcgccgtgcagcttgttcaaaagtgggagcgtctaaatgcagatgagcatattgaagtatcggaagacatgacacgtttaacgctggatacaattggtctttgcggcttcaactatcgctttaacagcttttaccgagatcagcctcatccatttattgtgagtgttgagggtgcactggatgaagtaatgaacaagctgcagcgagcaaatccagacgacccagcttatgatgaaaacaagcgccagtgtcaagaagacatcaaggtgatgaacgactatgtcgataaaattattgcagatcgcaaagcaaggggtgaacaaagccatgatttattaacgcagatgctaaacggaaaagatccagaaacgggtgagccgcttgatgacgggaacattcgttatcaaattctgacattcttaattgcgggacacgaaacaacaagtggtcttttatcatttgcgctgtatttcttagtgaaaaatccacatgtattacaaaaagtagcagaagaagcagcacgagttctagtagatcctgttccaagctacaaacaagtcaaacagcttaaatatgtcggcatggtcttaaacgaagcgctgcgcttatggccaactgctcctgcgttttccctatatgcaaaagaagatacggtacttggaggagaatatcctttaaccaaaggcgacgaagtaatggttctgattcctcagcttcaccgtgataaaacaatttggggagacgatgtggaggagttccgtccagagcgttttgaaaatccaagtgcgattccgcagcatgcgtttaaaccgtttggaaacggtcagcgtgcgtgtatcggttggcagttcgctcttcatgaagcacaactggtacttggtatgatgctaaaacactttgactttgaagatcatacaaactacgagctcgttattaaagaaaagttaacgttaaaacctgaaggctttgtggtaaaagcaaaatcgaaaggcattccgcttggcctgattccttcacctagcactgaacagtctgctaaaaaagtacgcaaaaaggcagaaaacgctcataatacgccgctgcttgtgctatacggttcaaatgcgggaacagctgaaggaacggcgcgtgatttagcagatattgcaatgagcaaaggatttgcaccgcaggtcgcaacgcttgattcacacgccggaaatcttccgcgcgaaggagctgtattaattgtaacggcgtcttataacggtcatccgcctgataacgcaaagagttttgtcgactggttagaccaagcgtctgctgatgaagtaaaaggcgttcgctactccgtatttggatgcggcgataaaaactgggctgcgacgtatcaaaaagtgcctgcttttatcgatgaaacgcttgccgctaaaggggcagaaaacatcgctgaccgcggtgaagcagatgcaagcgacgactttgaaggcgcgtatgaagaatggagtgatcatatgtggagtgacgtagcagcctactttaacctcgacattgaaaacagtgaagataataaatctactctttcacttcaatttgtcgacagcgccgcggatatgccgcttgcgaaaatgcacggtgcgttttcaacgaacgtcgtagcaagcaaagaacttcaacagccaggcagtgcacgaagcacgcgacatcttgaaattgaacttccaaaagaagcttcttatcaagaaggagatcatttaggtgttattcctcgcaactatgaaggaatagtaaaccgtgtaacagcaaggttcggcctaagcgcatcacagcaaatccgtctggaagcagaagaagaaaaattagctcatttgccactcgctaaaacagtatccgtagaagagcttctgcaatacgtggagcttcaagatcctgttacgcgcacgcagcttcgcgcaatggctgctaaaacggtctgcccgccgcataaagtagagcttgaagccttgcttgaaaagcaagcctacaaagaacaagtgctggcaaaacgtttaacaatgcttgaactgcttgaaaaatacccggcgtgtgaaatgaaattcagcgaatttatcgcccttctgccaagcatacgcccgcgctattactcgatttcttcatcacctcgtgtcgatgaaaaacaagcaagcatcacggtcagcgttgtctcaggaccggcgtggagcggatatggagaatataaaggaattgcgtcgaactatcttgccgagctgcaagaaggagatacgattacgtgctttatttccacagatcagtcagaatttacgctgccaaaagaccctgaaacgccgcttatcatggtcggaccgggaacaggcgtcgcgccgtttagaggctttgtgcaggcgcgcaaacagctaaaagaacaaggacagtcacttggagaagcacatttatacttcggctgccgttcacctcatgaagactatctgtatcaagaagagcttgaaaacgcccaaagcgaaggcatcattacgcttcataccgctttttctcgcatgccaaatcagccgaaaacatacgttcagcacgtaatggaacaagacggcaagaaattgattgaacttcttgatcaaggagcgcacttctatatttgcggagacggaagccaaatggcacctgccgttgaagcaacgcttatgaaaagctatgctgacgttcaccaagtgagtgaagcagacgctcgcttatggctgcagcagctagaagaaaaaggccgatacgcaaaagacgtgtgggctggg

SEQ ID NO: 696 - protein, 1049 aa, synthetic construct
  REGION 1..1049: note = Variant of cytochrome P450
MTIKEMPQPKTFGELKNLPLLNTDKPVQALMRIADELGEIFKFEAPGSVTRFLSSQRLIKEACDERRFDKNLSQGLKFARDFLGDGLFTSWTHEPNWKKAHNILGPSFSQLAMGRYHAMMVDIAVQLVQKWERLNADEHIEVSEDMTRLTLDTIGLCGFNYRFNSFYRDQPHPFIVSVEGALDEVMNKLQRANPDDPAYDENKRQCQEDIKVMNDYVDKIIADRKARGEQSHDLLTQMLNGKDPETGEPLDDGNIRYQILTFLIAGHETTSGLLSFALYFLVKNPHVLQKVAEEAARVLVDPVPSYKQVKQLKYVGMVLNEALRLWPTAPAFSLYAKEDTVLGGEYPLTKGDEVMVLIPQLHRDKTIWGDDVEEFRPERFENPSAIPQHAFKPFGNGQRACIGWQFALHEAQLVLGMMLKHFDFEDHTNYELVIKEKLTLKPEGFVVKAKSKGIPLGLIPSPSTEQSAKKVRKKAENAHNTPLLVLYGSNAGTAEGTARDLADIAMSKGFAPQVATLDSHAGNLPREGAVLIVTASYNGHPPDNAKSFVDWLDQASADEVKGVRYSVFGCGDKNWAATYQKVPAFIDETLAAKGAENIADRGEADASDDFEGAYEEWSDHMWSDVAAYFNLDIENSEDNKSTLSLQFVDSAADMPLAKMHGAFSTNVVASKELQQPGSARSTRHLEIELPKEASYQEGDHLGVIPRNYEGIVNRVTARFGLSASQQIRLEAEEEKLAHLPLAKTVSVEELLQYVELQDPVTRTQLRAMAAKTVCPPHKVELEALLEKQAYKEQVLAKRLTMLELLEKYPACEMKFSEFIALLPSIRPRYYSISSSPRVDEKQASITVSVVSGPAWSGYGEYKGIASNYLAELQEGDTITCFISTDQSEFTLPKDPETPLIMVGPGTGVAPFRGFVQARKQLKEQGQSLGEAHLYFGCRSPHEDYLYQEELENAQSEGIITLHTAFSRMPNQPKTYVQHVMEQDGKKLIELLDQGAHFYICGDGSQMAPAVEATLMKSYADVHQVSEADARLWLQQLEEKGRYAKDVWAG

SEQ ID NO: 697 - DNA, 3147 bp, synthetic construct
  misc_feature 1..3147: note = Variant of cytochrome P450
  source 1..3147: mol_type = other DNA
atgacaattaaggaaatgcctcagcctaagacgtttggagaacttaaaaatttaccgttattaaacacagataaaccggttcaagctttgatgcgtattgcggatgaattaggagaaatctttaaattcgaggcgcctggtagcgtaacgcgctttttatcaagtcagcgtctaattaaagaagcatgcgatgaacgccgctttgataaaaacttaagtcaaggccttaaatttgcacgtgattttcttggagacgggttatttacaagctggacgcatgaaccgaattggaaaaaagcgcataatatcttaggcccaagctttagtcagctggcaatgaagcgttatcatgcgatgatggtcgatatcgccgtgcagcttgttcaaaagtgggagcgtctaaatgcagatgagcatattgaagtatcggaagacatgacacgtttaacgctggatacaattggtctttgcggcttcaactatcgctttaacagcttttaccgagatcagcctcatccatttattgtgagtgttgagggtgcactggatgaagtaatgaacaagctgcagcgagcaaatccagacgacccagcttatgatgaaaacaagcgccagtgtcaagaagacatcaaggtgatgaacgactatgtcgataaaattattgcagatcgcaaagcaaggggtgaacaaagccatgatttattaacgcagatgctaaacggaaaagatccagaaacgggtgagccgcttgatgacgggaacattcgttatcaaattattacattcttaattgcgggacacgaaacaacaagtggtcttttatcatttgcgctgtatttcttagtgaaaaatccacatgtattacaaaaagtagcagaagaagcagcacgagttctagtagatcctgttccaagctacaaacaagtcaaacagcttaaatatgtcggcatggtcttaaacgaagcgctgcgcttatggccaactgctcctgcgttttccctatatgcaaaagaagatacgtgccttggaggagaatatcctttaaccaaaggcgacgaagtaatggttctgattcctcagcttcaccgtgataaaacaatttggggagacgatgttgagtcgttccgtccagagcgttttgaaaatccaagtgcgattccgcagcatgcgtttaaaccgtttggaaacggtcagcgtgcgtgtatcggttggcagttcgctcttcatgaagcaaccctggtacttggtatgatgctaaaacactttgactttgaagatcatacaaactacgagctcgttattaaagaaaagttaacgttaaaacctgaaggctttgtggtaaaagcaaaatcgaaaggcattccgcttggcctgattccttcacctagcactgaacagtctgctaaaaaagtacgcaaaaaggcagaaaacgctcataatacgccgctgcttgtgctatacggttcaaatgcgggaacagctgaaggaacggcgcgtgatttagcagatattgcaatgagcaaaggatttgcaccgcaggtcgcaacgcttgattcacacgccggaaatcttccgcgcgaaggagctgtattaattgtaacggcgtcttataacggtcatccgcctgataacgcaaagcagtttgtcgactggttagaccaagcgtctgctgatgaagtaaaaggcgttcgctactccgtatttggatgcggcgataaaaactgggctgcgacgtatcaaaaagtgcctgcttttatcgatgaaacgcttgccgctaaaggggcagaaaacatcgctgaccgcggtgaagcagatgcaagcgacgactttgaaggcgcgtatgaagaatggagtgatcatatgtggagtgacgtagcagcctactttaacctcgacattgaaaacagtgaagataataaatctactctttcacttcaatttgtcgacagcgccgcggatatgccgcttgcgaaaatgcacggtgcgttttcaacgaacgtcgtagcaagcaaagaacttcaacagccaggcagtgcacgaagcacgcgacatcttgaaattgaacttccaaaagaagcttcttatcaagaaggagatcatttaggtgttattcctcgcaactatgaaggaatagtaaaccgtgtaacagcaaggttcggcctaagcgcatcacagcaaatccgtctggaagcagaagaagaaaaattagctcatttgccactcgctaaaacagtatccgtagaagagcttctgcaatacgtggagcttcaagatcctgttacgcgcacgcagcttcgcgcaatggctgctaaaacggtctgcccgccgcataaagtagagcttgaagccttgcttgaaaagcaagcctacaaagaacaagtgctggcaaaacgtttaacaatgcttgaactgcttgaaaaatacccggcgtgtgaaatgaaattcagcgaatttatcgcccttctgccaagcatacgcccgcgctattactcgatttcttcatcacctcgtgtcgatgaaaaacaagcaagcatcacggtcagcgttgtctcaggaccggcgtggagcggatatggagaatataaaggaattgcgtcgaactatcttgccgagctgcaagaaggagatacgattacgtgctttatttccacagatcagtcagaatttacgctgccaaaagaccctgaaacgccgcttatcatggtcggaccgggaacaggcgtcgcgccgtttagaggctttgtgcaggcgcgcaaacagctaaaagaacaaggacagtcacttggagaagcacatttatacttcggctgccgttcacctcatgaagactatctgtatcaagaagagcttgaaaacgcccaaagcgaaggcatcattacgcttcataccgctttttctcgcatgccaaatcagccgaaaacatacgttcagcacgtaatggaacaagacggcaagaaattgattgaacttcttgatcaaggagcgcacttctatatttgcggagacggaagccaaatggcacctgccgttgaagcaacgcttatgaaaagctatgctgacgttcaccaagtgagtgaagcagacgctcgcttatggctgcagcagctagaagaaaaaggccgatacgcaaaagacgtgtgggctggg

SEQ ID NO: 698 - protein, 1049 aa, synthetic construct
  REGION 1..1049: note = Variant of cytochrome P450
MTIKEMPQPKTFGELKNLPLLNTDKPVQALMRIADELGEIFKFEAPGSVTRFLSSQRLIKEACDERRFDKNLSQGLKFARDFLGDGLFTSWTHEPNWKKAHNILGPSFSQLAMKRYHAMMVDIAVQLVQKWERLNADEHIEVSEDMTRLTLDTIGLCGFNYRFNSFYRDQPHPFIVSVEGALDEVMNKLQRANPDDPAYDENKRQCQEDIKVMNDYVDKIIADRKARGEQSHDLLTQMLNGKDPETGEPLDDGNIRYQIITFLIAGHETTSGLLSFALYFLVKNPHVLQKVAEEAARVLVDPVPSYKQVKQLKYVGMVLNEALRLWPTAPAFSLYAKEDTCLGGEYPLTKGDEVMVLIPQLHRDKTIWGDDVESFRPERFENPSAIPQHAFKPFGNGQRACIGWQFALHEATLVLGMMLKHFDFEDHTNYELVIKEKLTLKPEGFVVKAKSKGIPLGLIPSPSTEQSAKKVRKKAENAHNTPLLVLYGSNAGTAEGTARDLADIAMSKGFAPQVATLDSHAGNLPREGAVLIVTASYNGHPPDNAKQFVDWLDQASADEVKGVRYSVFGCGDKNWAATYQKVPAFIDETLAAKGAENIADRGEADASDDFEGAYEEWSDHMWSDVAAYFNLDIENSEDNKSTLSLQFVDSAADMPLAKMHGAFSTNVVASKELQQPGSARSTRHLEIELPKEASYQEGDHLGVIPRNYEGIVNRVTARFGLSASQQIRLEAEEEKLAHLPLAKTVSVEELLQYVELQDPVTRTQLRAMAAKTVCPPHKVELEALLEKQAYKEQVLAKRLTMLELLEKYPACEMKFSEFIALLPSIRPRYYSISSSPRVDEKQASITVSVVSGPAWSGYGEYKGIASNYLAELQEGDTITCFISTDQSEFTLPKDPETPLIMVGPGTGVAPFRGFVQARKQLKEQGQSLGEAHLYFGCRSPHEDYLYQEELENAQSEGIITLHTAFSRMPNQPKTYVQHVMEQDGKKLIELLDQGAHFYICGDGSQMAPAVEATLMKSYADVHQVSEADARLWLQQLEEKGRYAKDVWAG

SEQ ID NO: 699 - DNA, 3147 bp, synthetic construct
  misc_feature 1..3147: note = Variant of cytochrome P450
  source 1..3147: mol_type = other DNA
atgacaattaaggaaatgcctcagcctaagacgtttggagaacttaaaaatttaccgttattaaacacagataaaccggttcaagctttgatgcgtattgcggatgaattaggagaaatctttaaattcgaggcgcctggtagcgtaacgcgctttttatcaagtcagcgtctaattaaagaagcatgcgatgaaagccgctttgataaaaacttaagtcaaggccttaaatttgcacgtgattttcttggagacgggttatttacaagctggacgcatgaaccgaattggaaaaaagcgcataatatcttaggcccaagctttagtcagctggcaatgaagcgttatcatgcgatgatggtcgatatcgccgtgcagcttgttcaaaagtgggagcgtctaaatgcagatgagcatattgaagtatcggaagacatgacacgtttaacgctggatacaattggtctttgcggcttcaactatcgctttaacagcttttaccgagatcagctgcatccatttattgtgagtgttgagggtgcactggatgaagtaatgaacaagctgcagcgagcaaatccagacgacccagcttatgatgaaaacaagcgccagtgtcaagaagacatcaaggtgatgaacgactatgtcgataaaattattgcagatcgcaaagcaaggggtgaacaaagccatgatttattaacgcagatgctaaacggaaaagatccagaaacgggtgagccgcttgatgacgggaacattcgttatcaaattatcacattcttaattgcgggacacgaaacaacaagtggtcttttatcatttgcgctgtatttcttagtgaaaaatccacatgtattacaaaaagtagcagaagaagcagcacgagttctagtagatcctgttccaagctacaaacaagtcaaacagcttaaatatgtcggcatggtcttaaacgaagcgctgcgcttatggccaactgctcctgcgttttccctatatgcaaaagaagatacggtgcttggaggagaatatcctttaaccaaaggcgacgaagtaatggttctgattcctcagcttcaccgtgataaaacaatttggggagacgattcggagtcgttccgtccagagcgttttgaaaatccaagtgcgattccgcagcatgcgtttaaaccgtttggaaacggtcagcgtgcgtgtatcggttggcagttcgctcttcatgaagcaacgctggtacttggtatgatgctaaaacactttgactttgaagatcatacaaactacgagctcgttattaaagaaaagttaacgttaaaacctgaaggctttgtggtaaaagcaaaatcgaaaggcattccgcttggcctgattccttcacctagcactgaacagtctgctaaaaaagtacgcaaaaaggcagaaaacgctcataatacgccgctgcttgtgctatacggttcaaatgcgggaacagctgaaggaacggcgcgtgatttagcagatattgcaatgagcaaaggatttgcaccgcaggtcgcaacgcttgattcacacgccggaaatcttccgcgcgaaggagctgtattaattgtaacggcgtcttataacggtcatccgcctgataacgcaaagcagtttgtcgactggttagaccaagcgtctgctgatgaagtaaaaggcgttcgctactccgtatttggatgcggcgataaaaactgggctgcgacgtatcaaaaagtgcctgcttttatcgatgaaacgcttgccgctaaaggggcagaaaacatcgctgaccgcggtgaagcagatgcaagcgacgactttgaaggcgcgtatgaagaatggagtgatcatatgtggagtgacgtagcagcctactttaacctcgacattgaaaacagtgaagataataaatctactctttcacttcaatttgtcgacagcgccgcggatatgccgcttgcgaaaatgcacggtgcgttttcaacgaacgtcgtagcaagcaaagaacttcaacagccaggcagtgcacgaagcacgcgacatcttgaaattgaacttccaaaagaagcttcttatcaagaaggagatcatttaggtgttattcctcgcaactatgaaggaatagtaaaccgtgtaacagcaaggttcggcctaagcgcatcacagcaaatccgtctggaagcagaagaagaaaaattagctcatttgccactcgctaaaacagtatccgtagaagagcttctgcaatacgtggagcttcaagatcctgttacgcgcacgcagcttcgcgcaatggctgctaaaacggtctgcccgccgcataaagtagagcttgaagccttgcttgaaaagcaagcctacaaagaacaagtgctggcaaaacgtttaacaatgcttgaactgcttgaaaaatacccggcgtgtgaaatgaaattcagcgaatttatcgcccttctgccaagcatacgcccgcgctattactcgatttcttcatcacctcgtgtcgatgaaaaacaagcaagcatcacggtcagcgttgtctcaggaccggcgtggagcggatatggagaatataaaggaattgcgtcgaactatcttgccgagctgcaagaaggagatacgattacgtgctttatttccacagatcagtcagaatttacgctgccaaaagaccctgaaacgccgcttatcatggtcggaccgggaacaggcgtcgcgccgtttagaggctttgtgcaggcgcgcaaacagctaaaagaacaaggacagtcacttggagaagcacatttatacttcggctgccgttcacctcatgaagactatctgtatcaagaagagcttgaaaacgcccaaagcgaaggcatcattacgcttcataccgctttttctcgcatgccaaatcagccgaaaacatacgttcagcacgtaatggaacaagacggcaagaaattgattgaacttcttgatcaaggagcgcacttctatatttgcggagacggaagccaaatggcacctgccgttgaagcaacgcttatgaaaagctatgctgacgttcaccaagtgagtgaagcagacgctcgcttatggctgcagcagctagaagaaaaaggccgatacgcaaaagacgtgtgggctggg

SEQ ID NO: 700 - protein, 1049 aa, synthetic construct
  REGION 1..1049: note = Variant of cytochrome P450
MTIKEMPQPKTFGELKNLPLLNTDKPVQALMRIADELGEIFKFEAPGSVTRFLSSQRLIKEACDESRFDKNLSQGLKFARDFLGDGLFTSWTHEPNWKKAHNILGPSFSQLAMKRYHAMMVDIAVQLVQKWERLNADEHIEVSEDMTRLTLDTIGLCGFNYRFNSFYRDQLHPFIVSVEGALDEVMNKLQRANPDDPAYDENKRQCQEDIKVMNDYVDKIIADRKARGEQSHDLLTQMLNGKDPETGEPLDDGNIRYQIITFLIAGHETTSGLLSFALYFLVKNPHVLQKVAEEAARVLVDPVPSYKQVKQLKYVGMVLNEALRLWPTAPAFSLYAKEDTVLGGEYPLTKGDEVMVLIPQLHRDKTIWGDDSESFRPERFENPSAIPQHAFKPFGNGQRACIGWQFALHEATLVLGMMLKHFDFEDHTNYELVIKEKLTLKPEGFVVKAKSKGIPLGLIPSPSTEQSAKKVRKKAENAHNTPLLVLYGSNAGTAEGTARDLADIAMSKGFAPQVATLDSHAGNLPREGAVLIVTASYNGHPPDNAKQFVDWLDQASADEVKGVRYSVFGCGDKNWAATYQKVPAFIDETLAAKGAENIADRGEADASDDFEGAYEEWSDHMWSDVAAYFNLDIENSEDNKSTLSLQFVDSAADMPLAKMHGAFSTNVVASKELQQPGSARSTRHLEIELPKEASYQEGDHLGVIPRNYEGIVNRVTARFGLSASQQIRLEAEEEKLAHLPLAKTVSVEELLQYVELQDPVTRTQLRAMAAKTVCPPHKVELEALLEKQAYKEQVLAKRLTMLELLEKYPACEMKFSEFIALLPSIRPRYYSISSSPRVDEKQASITVSVVSGPAWSGYGEYKGIASNYLAELQEGDTITCFISTDQSEFTLPKDPETPLIMVGPGTGVAPFRGFVQARKQLKEQGQSLGEAHLYFGCRSPHEDYLYQEELENAQSEGIITLHTAFSRMPNQPKTYVQHVMEQDGKKLIELLDQGAHFYICGDGSQMAPAVEATLMKSYADVHQVSEADARLWLQQLEEKGRYAKDVWAG

SEQ ID NO: 701 - DNA, 3147 bp, synthetic construct
  misc_feature 1..3147: note = Variant of cytochrome P450
  source 1..3147: mol_type = other DNA
atgacaattaaggaaatgcctcagcctaagacgtttggagaacttaaaaatttaccgttattaaacacagataaaccggttcaagctttgatgcgtattgcggatgaattaggagaaatctttaaattcgaggcgcctggtagcgtaacgcgctttttatcaagtcagcgtctaattaaagaagcatgcgatgaaagccgctttgataaaaacttaagtcaaggccttaaatttgcacgtgattttcttggagacgggttatttacaagctggacgcatgaaccgaattggaaaaaagcgcataatatcttaggcccaagctttagtcagctggcaatgaagcgttatcatgcgatgatggtcgatatcgccgtgcagcttgttcaaaagtgggagcgtctaaatgcagatgagcatattgaagtatcggaagacatgacacgtttaacgctggatacaattggtctttgcggcttcaactatcgctttaacagcttttaccgagatcagctgcatccatttattgtgagtgttgagggtgcactggatgaagtaatgaacaagctgcagcgagcaaatccagacgacccagcttatgatgaaaacaagcgccagtgtcaagaagacatcaaggtgatgaacgactatgtcgataaaattattgcagatcgcaaagcaaggggtgaacaaagccatgatttattaacgcagatgctaaacggaaaagatccagaaacgggtgagccgcttgatgacgggaacattcgttatcaaattatcacattcttaattgcgggacacgaaacaacaagtggtcttttatcatttgcgctgtatttcttagtgaaaaatccacatgtattacaaaaagtagcagaagaagcagcacgagttctagtagatcctgttccaagctacaaacaagtcaaacagcttaaatatgtcggcatggtcttaaacgaagcgctgcgcttatggccaactgctcctgcgttttccctatatgcaaaagaagatacggtacttggaggagaatatcctttaaccaaaggcgacgaagtaatggttctgattcctcagcttcaccgtgataaaacaatttggggagacgatgttgagtcgttccgtccagagcgttttgaaaatccaagtgcgattccgcagcatgcgtttaaaccgtttggaaacggtcagcgtgcgtgtatcggttggcagttcgctcttcatgaagcaaccctggtacttggtatgatgctaaaacactttgactttgaagatcatacaaactacgagctcgttattaaagaaaagttaacgttaaaacctgaaggctttgtggtaaaagcaaaatcgaaaggcattccgcttggcctgattccttcacctagcactgaacagtctgctaaaaaagtacgcaaaaaggcagaaaacgctcataatacgccgctgcttgtgctatacggttcaaatgcgggaacagctgaaggaacggcgcgtgatttagcagatattgcaatgagcaaaggatttgcaccgcaggtcgcaacgcttgattcacacgccggaaatcttccgcgcgaaggagctgtattaattgtaacggcgtcttataacggtcatccgcctgataacgcaaagcagtttgtcgactggttagaccaagcgtctgctgatgaagtaaaaggcgttcgctactccgtatttggatgcggcgataaaaactgggctgcgacgtatcaaaaagtgcctgcttttatcgatgaaacgcttgccgctaaaggggcagaaaacatcgctgaccgcggtgaagcagatgcaagcgacgactttgaaggcgcgtatgaagaatggagtgatcatatgtggagtgacgtagcagcctactttaacctcgacattgaaaacagtgaagataataaatctactctttcacttcaatttgtcgacagcgccgcggatatgccgcttgcgaaaatgcacggtgcgttttcaacgaacgtcgtagcaagcaaagaacttcaacagccaggcagtgcacgaagcacgcgacatcttgaaattgaacttccaaaagaagcttcttatcaagaaggagatcatttaggtgttattcctcgcaactatgaaggaatagtaaaccgtgtaacagcaaggttcggcctaagcgcatcacagcaaatccgtctggaagcagaagaagaaaaattagctcatttgccactcgctaaaacagtatccgtagaagagcttctgcaatacgtggagcttcaagatcctgttacgcgcacgcagcttcgcgcaatggctgctaaaacggtctgcccgccgcataaagtagagcttgaagccttgcttgaaaagcaagcctacaaagaacaagtgctggcaaaacgtttaacaatgcttgaactgcttgaaaaatacccggcgtgtgaaatgaaattcagcgaatttatcgcccttctgccaagcatacgcccgcgctattactcgatttcttcatcacctcgtgtcgatgaaaaacaagcaagcatcacggtcagcgttgtctcaggaccggcgtggagcggatatggagaatataaaggaattgcgtcgaactatcttgccgagctgcaagaaggagatacgattacgtgctttatttccacagatcagtcagaatttacgctgccaaaagaccctgaaacgccgcttatcatggtcggaccgggaacaggcgtcgcgccgtttagaggctttgtgcaggcgcgcaaacagctaaaagaacaaggacagtcacttggagaagcacatttatacttcggctgccgttcacctcatgaagactatctgtatcaagaagagcttgaaaacgcccaaagcgaaggcatcattacgcttcataccgctttttctcgcatgccaaatcagccgaaaacatacgttcagcacgtaatggaacaagacggcaagaaattgattgaacttcttgatcaaggagcgcacttctatatttgcggagacggaagccaaatggcacctgccgttgaagcaacgcttatgaaaagctatgctgacgttcaccaagtgagtgaagcagacgctcgcttatggctgcagcagctagaagaaaaaggccgatacgcaaaagacgtgtgggctggg

SEQ ID NO: 702 - protein, 1049 aa, synthetic construct
  REGION 1..1049: note = Variant of cytochrome P450
MTIKEMPQPKTFGELKNLPLLNTDKPVQALMRIADELGEIFKFEAPGSVTRFLSSQRLIKEACDESRFDKNLSQGLKFARDFLGDGLFTSWTHEPNWKKAHNILGPSFSQLAMKRYHAMMVDIAVQLVQKWERLNADEHIEVSEDMTRLTLDTIGLCGFNYRFNSFYRDQLHPFIVSVEGALDEVMNKLQRANPDDPAYDENKRQCQEDIKVMNDYVDKIIADRKARGEQSHDLLTQMLNGKDPETGEPLDDGNIRYQIITFLIAGHETTSGLLSFALYFLVKNPHVLQKVAEEAARVLVDPVPSYKQVKQLKYVGMVLNEALRLWPTAPAFSLYAKEDTVLGGEYPLTKGDEVMVLIPQLHRDKTIWGDDVESFRPERFENPSAIPQHAFKPFGNGQRACIGWQFALHEATLVLGMMLKHFDFEDHTNYELVIKEKLTLKPEGFVVKAKSKGIPLGLIPSPSTEQSAKKVRKKAENAHNTPLLVLYGSNAGTAEGTARDLADIAMSKGFAPQVATLDSHAGNLPREGAVLIVTASYNGHPPDNAKQFVDWLDQASADEVKGVRYSVFGCGDKNWAATYQKVPAFIDETLAAKGAENIADRGEADASDDFEGAYEEWSDHMWSDVAAYFNLDIENSEDNKSTLSLQFVDSAADMPLAKMHGAFSTNVVASKELQQPGSARSTRHLEIELPKEASYQEGDHLGVIPRNYEGIVNRVTARFGLSASQQIRLEAEEEKLAHLPLAKTVSVEELLQYVELQDPVTRTQLRAMAAKTVCPPHKVELEALLEKQAYKEQVLAKRLTMLELLEKYPACEMKFSEFIALLPSIRPRYYSISSSPRVDEKQASITVSVVSGPAWSGYGEYKGIASNYLAELQEGDTITCFISTDQSEFTLPKDPETPLIMVGPGTGVAPFRGFVQARKQLKEQGQSLGEAHLYFGCRSPHEDYLYQEELENAQSEGIITLHTAFSRMPNQPKTYVQHVMEQDGKKLIELLDQGAHFYICGDGSQMAPAVEATLMKSYADVHQVSEADARLWLQQLEEKGRYAKDVWAG

SEQ ID NO: 703 - DNA, 3147 bp, synthetic construct
  misc_feature 1..3147: note = Variant of cytochrome P450
  source 1..3147: mol_type = other DNA
atgacaattaaggaaatgcctcagcctaagacgtttggagaacttaaaaatttaccgttattaaacacagataaaccggttcaagctttgatgcgtattgcggatgaattaggagaaatctttaaattcgaggcgcctggtagcgtaacgcgctttttatcaagtcagcgtctaattaaagaagcatgcgatgaatcacgctttgataaaaacttaagtcaaggccttaaatttgcacgtgattttcttggagacgggttatttacaagctggacgcatgaaccgaattggaaaaaagcgcataatatcttaggcccaagctttagtcagctggcaatgggccgttatcatgcgatgatggtcgatatcgccgtgcagcttgttcaaaagtgggagcgtctaaatgcagatgagcatattgaagtatcggaagacatgacacgtttaacgctggatacaattggtctttgcggcttcaactatcgctttaacagcttttaccgagatcagctgcatccatttattgtgagtgttgagggtgcactggatgaagtaatgaacaagctgcagcgagcaaatccagacgacccagcttatgatgaaaacaagcgccagtgtcaagaagacatcaaggtgatgaacgactatgtcgataaaattattgcagatcgcaaagcaaggggtgaacaaagccatgatttattaacgcagatgctaaacggaaaagatccagaaacgggtgagccgcttgatgacgggaacattcgttatcaaattctgacattcttaattgcgggacacgaaacaacaagtggtcttttatcatttgcgctgtatttcttagtgaaaaatccacatgtattacaaaaagtagcagaagaagcagcacgagttctagtagatcctgttccaagctacaaacaagtcaaacagcttaaatatgtcggcatggtcttaaacgaagcgctgcgcttatggccaactgctcctgcgttttccctatatgcaaaagaagatacgtgccttggaggagaatatcctttaaccaaaggcgacgaagtaatggttctgattcctcagcttcaccgtgataaaacaatttggggagacgatgtggaggagttccgtccagagcgttttgaaaatccaagtgcgattccgcagcatgcgtttaaaccgtttggaaacggtcagcgtgcgtgtatcggttggcagttcgctcttcatgaagcaacgctggtacttggtatgatgctaaaacactttgactttgaagatcatacaaactacgagctcgttattaaagaaaagttaacgttaaaacctgaaggctttgtggtaaaagcaaaatcgaaaggcattccgcttggcctgattccttcacctagcactgaacagtctgctaaaaaagtacgcaaaaaggcagaaaacgctcataatacgccgctgcttgtgctatacggttcaaatgcgggaacagctgaaggaacggcgcgtgatttagcagatattgcaatgagcaaaggatttgcaccgcaggtcgcaacgcttgattcacacgccggaaatcttccgcgcgaaggagctgtattaattgtaacggcgtcttataacggtcatccgcctgataacgcaaagcagtttgtcgactggttagaccaagcgtctgctgatgaagtaaaaggcgttcgctactccgtatttggatgcggcgataaaaactgggctgcgacgtatcaaaaagtgcctgcttttatcgatgaaacgcttgccgctaaaggggcagaaaacatcgctgaccgcggtgaagcagatgcaagcgacgactttgaaggcgcgtatgaagaatggagtgatcatatgtggagtgacgtagcagcctactttaacctcgacattgaaaacagtgaagataataaatctactctttcacttcaatttgtcgacagcgccgcggatatgccgcttgcgaaaatgcacggtgcgttttcaacgaacgtcgtagcaagcaaagaacttcaacagccaggcagtgcacgaagcacgcgacatcttgaaattgaacttccaaaagaagcttcttatcaagaaggagatcatttaggtgttattcctcgcaactatgaaggaatagtaaaccgtgtaacagcaaggttcggcctaagcgcatcacagcaaatccgtctggaagcagaagaagaaaaattagctcatttgccactcgctaaaacagtatccgtagaagagcttctgcaatacgtggagcttcaagatcctgttacgcgcacgcagcttcgcgcaatggctgctaaaacggtctgcccgccgcataaagtagagcttgaagccttgcttgaaaagcaagcctacaaagaacaagtgctggcaaaacgtttaacaatgcttgaactgcttgaaaaatacccggcgtgtgaaatgaaattcagcgaatttatcgcccttctgccaagcatacgcccgcgctattactcgatttcttcatcacctcgtgtcgatgaaaaacaagcaagcatcacggtcagcgttgtctcaggaccggcgtggagcggatatggagaatataaaggaattgcgtcgaactatcttgccgagctgcaagaaggagatacgattacgtgctttatttccacagatcagtcagaatttacgctgccaaaagaccctgaaacgccgcttatcatggtcggaccgggaacaggcgtcgcgccgtttagaggctttgtgcaggcgcgcaaacagctaaaagaacaaggacagtcacttggagaagcacatttatacttcggctgccgttcacctcatgaagactatctgtatcaagaagagcttgaaaacgcccaaagcgaaggcatcattacgcttcataccgctttttctcgcatgccaaatcagccgaaaacatacgttcagcacgtaatggaacaagacggcaagaaattgattgaacttcttgatcaaggagcgcacttctatatttgcggagacggaagccaaatggcacctgccgttgaagcaacgcttatgaaaagctatgctgacgttcaccaagtgagtgaagcagacgctcgcttatggctgcagcagctagaagaaaaaggccgatacgcaaaagacgtgtgggctggg

SEQ ID NO: 704 - protein, 1049 aa, synthetic construct
  REGION 1..1049: note = Variant of cytochrome P450
MTIKEMPQPKTFGELKNLPLLNTDKPVQALMRIADELGEIFKFEAPGSVTRFLSSQRLIKEACDESRFDKNLSQGLKFARDFLGDGLFTSWTHEPNWKKAHNILGPSFSQLAMGRYHAMMVDIAVQLVQKWERLNADEHIEVSEDMTRLTLDTIGLCGFNYRFNSFYRDQLHPFIVSVEGALDEVMNKLQRANPDDPAYDENKRQCQEDIKVMNDYVDKIIADRKARGEQSHDLLTQMLNGKDPETGEPLDDGNIRYQILTFLIAGHETTSGLLSFALYFLVKNPHVLQKVAEEAARVLVDPVPSYKQVKQLKYVGMVLNEALRLWPTAPAFSLYAKEDTCLGGEYPLTKGDEVMVLIPQLHRDKTIWGDDVEEFRPERFENPSAIPQHAFKPFGNGQRACIGWQFALHEATLVLGMMLKHFDFEDHTNYELVIKEKLTLKPEGFVVKAKSKGIPLGLIPSPSTEQSAKKVRKKAENAHNTPLLVLYGSNAGTAEGTARDLADIAMSKGFAPQVATLDSHAGNLPREGAVLIVTASYNGHPPDNAKQFVDWLDQASADEVKGVRYSVFGCGDKNWAATYQKVPAFIDETLAAKGAENIADRGEADASDDFEGAYEEWSDHMWSDVAAYFNLDIENSEDNKSTLSLQFVDSAADMPLAKMHGAFSTNVVASKELQQPGSARSTRHLEIELPKEASYQEGDHLGVIPRNYEGIVNRVTARFGLSASQQIRLEAEEEKLAHLPLAKTVSVEELLQYVELQDPVTRTQLRAMAAKTVCPPHKVELEALLEKQAYKEQVLAKRLTMLELLEKYPACEMKFSEFIALLPSIRPRYYSISSSPRVDEKQASITVSVVSGPAWSGYGEYKGIASNYLAELQEGDTITCFISTDQSEFTLPKDPETPLIMVGPGTGVAPFRGFVQARKQLKEQGQSLGEAHLYFGCRSPHEDYLYQEELENAQSEGIITLHTAFSRMPNQPKTYVQHVMEQDGKKLIELLDQGAHFYICGDGSQMAPAVEATLMKSYADVHQVSEADARLWLQQLEEKGRYAKDVWAG

SEQ ID NO: 705 - DNA, 3147 bp, synthetic construct
  misc_feature 1..3147: note = Variant of cytochrome P450
  source 1..3147: mol_type = other DNA
atgacaattaaggaaatgcctcagcctaagacgtttggagaacttaaaaatttaccgttattaaacacagataaaccggttcaagctttgatgcgtattgcggatgaattaggagaaatctttaaattcgaggcgcctggtagcgtaacgcgctttttatcaagtcagcgtctaattaaagaagcatgcgatgaaagccgctttgataaaaacttaagtcaaggccttaaatttgcacgtgattttcttggagacgggttatttacaagctggacgcatgaaccgaattggaaaaaagcgcataatatcttaggcccaagctttagtcagctggcaatgcgccgttatcatgcgatgatggtcgatatcgccgtgcagcttgttcaaaagtgggagcgtctaaatgcagatgagcatattgaagtatcggaagacatgacacgtttaacgctggatacaattggtctttgcggcttcaactatcgctttaacagcttttaccgagatcagccgcatccatttattgtgagtgttgagggtgcactggatgaagtaatgaacaagctgcagcgagcaaatccagacgacccagcttatgatgaaaacaagcgccagtgtcaagaagacatcaaggtgatgaacgactatgtcgataaaattattgcagatcgcaaagcaaggggtgaacaaagccatgatttattaacgcagatgctaaacggaaaagatccagaaacgggtgagccgcttgatgacgggaacattcgttatcaaattctgacattcttaattgcgggacacgaaacaacaagtggtcttttatcatttgcgctgtatttcttagtgaaaaatccacatgtattacaaaaagtagcagaagaagcagcacgagttctagtagatcctgttccaagctacaaacaagtcaaacagcttaaatatgtcggcatggtcttaaacgaagcgctgcgcttatggccaactgctcctgcgttttccctatatgcaaaagaagatacggtgcttggaggagaatatcctttaaccaaaggcgacgaagtaatggttctgattcctcagcttcaccgtgataaaacaatttggggagacgattcggagtcgttccgtccagagcgttttgaaaatccaagtgcgattccgcagcatgcgtttaaaccgtttggaaacggtcagcgtgcgtgtatcggttggcagttcgctcttcatgaagcaacgctggtacttggtatgatgctaaaacactttgactttgaagatcatacaaactacgagctcgttattaaagaaatgttaacgttaaaacctgaaggctttgtggtaaaagcaaaatcgaaaggcattccgcttggcctgattccttcacctagcactgaacagtctgctaaaaaagtacgcaaaaaggcagaaaacgctcataatacgccgctgcttgtgctatacggttcaaatgcgggaacagctgaaggaacggcgcgtgatttagcagatattgcaatgagcaaaggatttgcaccgcaggtcgcaacgcttgattcacacgccggaaatcttccgcgcgaaggagctgtattaattgtaacggcgtcttataacggtcatccgcctgataacgcaaagcaatttgtcgactggttagaccaagcgtctgctgatgaagtaaaaggcgttcgctactccgtatttggatgcggcgataaaaactgggctgcgacgtatcaaaaagtgcctgcttttatcgatgaaacgcttgccgctaaaggggcagaaaacatcgctgaccgcggtgaagcagatgcaagcgacgactttgaaggcgcgtatgaagaatggagtgatcatatgtggagtgacgtagcagcctactttaacctcgacattgaaaacagtgaagataataaatctactctttcacttcaatttgtcgacagcgccgcggatatgccgcttgcgaaaatgcacggtgcgttttcaacgaacgtcgtagcaagcaaagaacttcaacagccaggcagtgcacgaagcacgcgacatcttgaaattgaacttccaaaagaagcttcttatcaagaaggagatcatttaggtgttattcctcgcaactatgaaggaatagtaaaccgtgtaacagcaaggttcggcctaagcgcatcacagcaaatccgtctggaagcagaagaagaaaaattagctcatttgccactcgctaaaacagtatccgtagaagagcttctgcaatacgtggagcttcaagatcctgttacgcgcacgcagcttcgcgcaatggctgctaaaacggtctgcccgccgcataaagtagagcttgaagccttgcttgaaaagcaagcctacaaagaacaagtgctggcaaaacgtttaacaatgcttgaactgcttgaaaaatacccggcgtgtgaaatgaaattcagcgaatttatcgcccttctgccaagcatacgcccgcgctattactcgatttcttcatcacctcgtgtcgatgaaaaacaagcaagcatcacggtcagcgttgtctcaggaccggcgtggagcggatatggagaatataaaggaattgcgtcgaactatcttgccgagctgcaagaaggagatacgattacgtgctttatttccacagatcagtcagaatttacgctgccaaaagaccctgaaacgccgcttatcatggtcggaccgggaacaggcgtcgcgccgtttagaggctttgtgcaggcgcgcaaacagctaaaagaacaaggacagtcacttggagaagcacatttatacttcggctgccgttcacctcatgaagactatctgtatcaagaagagcttgaaaacgcccaaagcgaaggcatcattacgcttcataccgctttttctcgcatgccaaatcagccgaaaacatacgttcagcacgtaatggaacaagacggcaagaaattgattgaacttcttgatcaaggagcgcacttctatatttgcggagacggaagccaaatggcacctgccgttgaagcaacgcttatgaaaagctatgctgacgttcaccaagtgagtgaagcagacgctcgcttatggctgcagcagctagaagaaaaaggccgatacgcaaaagacgtgtgggctggg

SEQ ID NO: 706 - protein, 1049 aa, synthetic construct
  REGION 1..1049: note = Variant of cytochrome P450
MTIKEMPQPKTFGELKNLPLLNTDKPVQALMRIADELGEIFKFEAPGSVTRFLSSQRLIKEACDESRFDKNLSQGLKFARDFLGDGLFTSWTHEPNWKKAHNILGPSFSQLAMRRYHAMMVDIAVQLVQKWERLNADEHIEVSEDMTRLTLDTIGLCGFNYRFNSFYRDQPHPFIVSVEGALDEVMNKLQRANPDDPAYDENKRQCQEDIKVMNDYVDKIIADRKARGEQSHDLLTQMLNGKDPETGEPLDDGNIRYQILTFLIAGHETTSGLLSFALYFLVKNPHVLQKVAEEAARVLVDPVPSYKQVKQLKYVGMVLNEALRLWPTAPAFSLYAKEDTVLGGEYPLTKGDEVMVLIPQLHRDKTIWGDDSESFRPERFENPSAIPQHAFKPFGNGQRACIGWQFALHEATLVLGMMLKHFDFEDHTNYELVIKEMLTLKPEGFVVKAKSKGIPLGLIPSPSTEQSAKKVRKKAENAHNTPLLVLYGSNAGTAEGTARDLADIAMSKGFAPQVATLDSHAGNLPREGAVLIVTASYNGHPPDNAKQFVDWLDQASADEVKGVRYSVFGCGDKNWAATYQKVPAFIDETLAAKGAENIADRGEADASDDFEGAYEEWSDHMWSDVAAYFNLDIENSEDNKSTLSLQFVDSAADMPLAKMHGAFSTNVVASKELQQPGSARSTRHLEIELPKEASYQEGDHLGVIPRNYEGIVNRVTARFGLSASQQIRLEAEEEKLAHLPLAKTVSVEELLQYVELQDPVTRTQLRAMAAKTVCPPHKVELEALLEKQAYKEQVLAKRLTMLELLEKYPACEMKFSEFIALLPSIRPRYYSISSSPRVDEKQASITVSVVSGPAWSGYGEYKGIASNYLAELQEGDTITCFISTDQSEFTLPKDPETPLIMVGPGTGVAPFRGFVQARKQLKEQGQSLGEAHLYFGCRSPHEDYLYQEELENAQSEGIITLHTAFSRMPNQPKTYVQHVMEQDGKKLIELLDQGAHFYICGDGSQMAPAVEATLMKSYADVHQVSEADARLWLQQLEEKGRYAKDVWAG

SEQ ID NO: 707 - DNA, 3147 bp, synthetic construct
  misc_feature 1..3147: note = Variant of cytochrome P450
  source 1..3147: mol_type = other DNA
atgacaattaaggaaatgcctcagcctaagacgtttggagaacttaaaaatttaccgttattaaacacagataaaccggttcaagctttgatgcgtattgcggatgaattaggagaaatctttaaattcgaggcgcctggtagcgtaacgcgctttttatcaagtcagcgtctaattaaagaagcatgcgatgaacgccgctttgataaaaacttaagtcaaggccttaaatttgcacgtgattttcttggagacgggttatttacaagctggacgcatgaaccgaattggaaaaaagcgcataatatcttaggcccaagctttagtcagctggcaatgcgccgttatcatgcgatgatggtcgatatcgccgtgcagcttgttcaaaagtgggagcgtctaaatgcagatgagcatattgaagtatcggaagacatgacacgtttaacgctggatacaattggtctttgcggcttcaactatcgctttaacagcttttaccgagatcagctgcatccatttattgtgagtgttgagggtgcactggatgaagtaatgaacaagctgcagcgagcaaatccagacgacccagcttatgatgaaaacaagcgccagtgtcaagaagacatcaaggtgatgaacgactatgtcgataaaattattgcagatcgcaaagcaaggggtgaacaaagccatgatttattaacgcagatgctaaacggaaaagatccagaaacgggtgagccgcttgatgacgggaacattcgttatcaaattattacattcttaattgcgggacacgaaacaacaagtggtcttttatcatttgcgctgtatttcttagtgaaaaatccacatgtattacaaaaagtagcagaagaagcagcacgagttctagtagatcctgttccaagctacaaacaagtcaaacagcttaaatatgtcggcatggtcttaaacgaagcgctgcgcttatggccaactgctcctgcgttttccctatatgcaaaagaagatacggtacttggaggagaatatcctttaaccaaaggcgacgaagtaatggttctgattcctcagcttcaccgtgataaaacaatttggggagacgatgtggaggagttccgtccagagcgttttgaaaatccaagtgcgattccgcagcatgcgtttaaaccgtttggaaacggtcagcgtgcgtgtatcggttggcagttcgctcttcatgaagcaacgctggtacttggtatgatgctaaaacactttgactttgaagatcatacaaactacgagctcgttattaaagaaaagttaacgttaaaacctgaaggctttgtggtaaaagcaaaatcgaaaggcattccgcttggcctgattccttcacctagcactgaacagtctgctaaaaaagtacgcaaaaaggcagaaaacgctcataatacgccgctgcttgtgctatacggttcaaatgcgggaacagctgaaggaacggcgcgtgatttagcagatattgcaatgagcaaaggatttgcaccgcaggtcgcaacgcttgattcacacgccggaaatcttccgcgcgaaggagctgtattaattgtaacggcgtcttataacggtcatccgcctgataacgcaaagagttttgtcgactggttagaccaagcgtctgctgatgaagtaaaaggcgttcgctactccgtatttggatgcggcgataaaaactgggctgcgacgtatcaaaaagtgcctgcttttatcgatgaaacgcttgccgctaaaggggcagaaaacatcgctgaccgcggtgaagcagatgcaagcgacgactttgaaggcgcgtatgaagaatggagtgatcatatgtggagtgacgtagcagcctactttaacctcgacattgaaaacagtgaagataataaatctactctttcacttcaatttgtcgacagcgccgcggatatgccgcttgcgaaaatgcacggtgcgttttcaacgaacgtcgtagcaagcaaagaacttcaacagccaggcagtgcacgaagcacgcgacatcttgaaattgaacttccaaaagaagcttcttatcaagaaggagatcatttaggtgttattcctcgcaactatgaaggaatagtaaaccgtgtaacagcaaggttcggcctaagcgcatcacagcaaatccgtctggaagcagaagaagaaaaattagctcatttgccactcgctaaaacagtatccgtagaagagcttctgcaatacgtggagcttcaagatcctgttacgcgcacgcagcttcgcgcaatggctgctaaaacggtctgcccgccgcataaagtagagcttgaagccttgcttgaaaagcaagcctacaaagaacaagtgctggcaaaacgtttaacaatgcttgaactgcttgaaaaatacccggcgtgtgaaatgaaattcagcgaatttatcgcccttctgccaagcatacgcccgcgctattactcgatttcttcatcacctcgtgtcgatgaaaaacaagcaagcatcacggtcagcgttgtctcaggaccggcgtggagcggatatggagaatataaaggaattgcgtcgaactatcttgccgagctgcaagaaggagatacgattacgtgctttatttccacagatcagtcagaatttacgctgccaaaagaccctgaaacgccgcttatcatggtcggaccgggaacaggcgtcgcgccgtttagaggctttgtgcaggcgcgcaaacagctaaaagaacaaggacagtcacttggagaagcacatttatacttcggctgccgttcacctcatgaagactatctgtatcaagaagagcttgaaaacgcccaaagcgaaggcatcattacgcttcataccgctttttctcgcatgccaaatcagccgaaaacatacgttcagcacgtaatggaacaagacggcaagaaattgattgaacttcttgatcaaggagcgcacttctatatttgcggagacggaagccaaatggcacctgccgttgaagcaacgcttatgaaaagctatgctgacgttcaccaagtgagtgaagcagacgctcgcttatggctgcagcagctagaagaaaaaggccgatacgcaaaagacgtgtgggctggg

SEQ ID NO: 708 - protein, 1049 aa, synthetic construct
  REGION 1..1049: note = Variant of cytochrome P450
MTIKEMPQPKTFGELKNLPLLNTDKPVQALMRIADELGEIFKFEAPGSVTRFLSSQRLIKEACDERRFDKNLSQGLKFARDFLGDGLFTSWTHEPNWKKAHNILGPSFSQLAMRRYHAMMVDIAVQLVQKWERLNADEHIEVSEDMTRLTLDTIGLCGFNYRFNSFYRDQLHPFIVSVEGALDEVMNKLQRANPDDPAYDENKRQCQEDIKVMNDYVDKIIADRKARGEQSHDLLTQMLNGKDPETGEPLDDGNIRYQIITFLIAGHETTSGLLSFALYFLVKNPHVLQKVAEEAARVLVDPVPSYKQVKQLKYVGMVLNEALRLWPTAPAFSLYAKEDTVLGGEYPLTKGDEVMVLIPQLHRDKTIWGDDVEEFRPERFENPSAIPQHAFKPFGNGQRACIGWQFALHEATLVLGMMLKHFDFEDHTNYELVIKEKLTLKPEGFVVKAKSKGIPLGLIPSPSTEQSAKKVRKKAENAHNTPLLVLYGSNAGTAEGTARDLADIAMSKGFAPQVATLDSHAGNLPREGAVLIVTASYNGHPPDNAKSFVDWLDQASADEVKGVRYSVFGCGDKNWAATYQKVPAFIDETLAAKGAENIADRGEADASDDFEGAYEEWSDHMWSDVAAYFNLDIENSEDNKSTLSLQFVDSAADMPLAKMHGAFSTNVVASKELQQPGSARSTRHLEIELPKEASYQEGDHLGVIPRNYEGIVNRVTARFGLSASQQIRLEAEEEKLAHLPLAKTVSVEELLQYVELQDPVTRTQLRAMAAKTVCPPHKVELEALLEKQAYKEQVLAKRLTMLELLEKYPACEMKFSEFIALLPSIRPRYYSISSSPRVDEKQASITVSVVSGPAWSGYGEYKGIASNYLAELQEGDTITCFISTDQSEFTLPKDPETPLIMVGPGTGVAPFRGFVQARKQLKEQGQSLGEAHLYFGCRSPHEDYLYQEELENAQSEGIITLHTAFSRMPNQPKTYVQHVMEQDGKKLIELLDQGAHFYICGDGSQMAPAVEATLMKSYADVHQVSEADARLWLQQLEEKGRYAKDVWAG

SEQ ID NO: 709 - DNA, 3147 bp, synthetic construct
  misc_feature 1..3147: note = Variant of cytochrome P450
  source 1..3147: mol_type = other DNA
atgacaattaaggaaatgcctcagcctaagacgtttggagaacttaaaaatttaccgttattaaacacagataaaccggttcaagctttgatgcgtattgcggatgaattaggagaaatctttaaattcgaggcgcctggtagcgtaacgcgctttttatcaagtcagcgtctaattaaagaagcatgcgatgaacgccgctttgataaaaacttaagtcaaggccttaaatttgcacgtgattttcttggagacgggttatttacaagctggacgcatgaaccgaattggaaaaaagcgcataatatcttaggcccaagctttagtcagctggcaatgaagcgttatcatgcgatgatggtcgatatcgccgtgcagcttgttcaaaagtgggagcgtctaaatgcagatgagcatattgaagtatcggaagacatgacacgtttaacgctggatacaattggtctttgcggcttcaactatcgctttaacagcttttaccgagatcagcctcatccatttattgtgagtgttgagggtgcactggatgaagtaatgaacaagctgcagcgagcaaatccagacgacccagcttatgatgaaaacaagcgccagtgtcaagaagacatcaaggtgatgaacgactatgtcgataaaattattgcagatcgcaaagcaaggggtgaacaaagccatgatttattaacgcagatgctaaacggaaaagatccagaaacgggtgagccgcttgatgacgggaacattcgttatcaaattattacattcttaattgcgggacacgaaacaacaagtggtcttttatcatttgcgctgtatttcttagtgaaaaatccacatgtattacaaaaagtagcagaagaagcagcacgagttctagtagatcctgttccaagctacaaacaagtcaaacagcttaaatatgtcggcatggtcttaaacgaagcgctgcgcttatggccaactgctcctgcgttttccctatatgcaaaagaagatacggtacttggaggagaatatcctttaaccaaaggcgacgaagtaatggttctgattcctcagcttcaccgtgataaaacaatttggggagacgatgtggaggagttccgtccagagcgttttgaaaatccaagtgcgattccgcagcatgcgtttaaaccgtttggaaacggtcagcgtgcgtgtatcggttggcagttcgctcttcatgaagcaacgctggtacttggtatgatgctaaaacactttgactttgaagatcatacaaactacgagctcgttattaaagaaaagttaacgttaaaacctgaaggctttgtggtaaaagcaaaatcgaaaggcattccgcttggcctgattccttcacctagcactgaacagtctgctaaaaaagtacgcaaaaaggcagaaaacgctcataatacgccgctgcttgtgctatacggttcaaatgcgggaacagctgaaggaacggcgcgtgatttagcagatattgcaatgagcaaaggatttgcaccgcaggtcgcaacgcttgattcacacgccggaaatcttccgcgcgaaggagctgtattaattgtaacggcgtcttataacggtcatccgcctgataacgcaaagcagtttgtcgactggttagaccaagcgtctgctgatgaagtaaaaggcgttcgctactccgtatttggatgcggcgataaaaactgggctgcgacgtatcaaaaagtgcctgcttttatcgatgaaacgcttgccgctaaaggggcagaaaacatcgctgaccgcggtgaagcagatgcaagcgacgactttgaaggcgcgtatgaagaatggagtgatcatatgtggagtgacgtagcagcctactttaacctcgacattgaaaacagtgaagataataaatctactctttcacttcaatttgtcgacagcgccgcggatatgccgcttgcgaaaatgcacggtgcgttttcaacgaacgtcgtagcaagcaaagaacttcaacagccaggcagtgcacgaagcacgcgacatcttgaaattgaacttccaaaagaagcttcttatcaagaaggagatcatttaggtgttattcctcgcaactatgaaggaatagtaaaccgtgtaacagcaaggttcggcctaagcgcatcacagcaaatccgtctggaagcagaagaagaaaaattagctcatttgccactcgctaaaacagtatccgtagaagagcttctgcaatacgtggagcttcaagatcctgttacgcgcacgcagcttcgcgcaatggctgctaaaacggtctgcccgccgcataaagtagagcttgaagccttgcttgaaaagcaagcctacaaagaacaagtgctggcaaaacgtttaacaatgcttgaactgcttgaaaaatacccggcgtgtgaaatgaaattcagcgaatttatcgcccttctgccaagcatacgcccgcgctattactcgatttcttcatcacctcgtgtcgatgaaaaacaagcaagcatcacggtcagcgttgtctcaggaccggcgtggagcggatatggagaatataaaggaattgcgtcgaactatcttgccgagctgcaagaaggagatacgattacgtgctttatttccacagatcagtcagaatttacgctgccaaaagaccctgaaacgccgcttatcatggtcggaccgggaacaggcgtcgcgccgtttagaggctttgtgcaggcgcgcaaacagctaaaagaacaaggacagtcacttggagaagcacatttatacttcggctgccgttcacctcatgaagactatctgtatcaagaagagcttgaaaacgcccaaagcgaaggcatcattacgcttcataccgctttttctcgcatgccaaatcagccgaaaacatacgttcagcacgtaatggaacaagacggcaagaaattgattgaacttcttgatcaaggagcgcacttctatatttgcggagacggaagccaaatggcacctgccgttgaagcaacgcttatgaaaagctatgctgacgttcaccaagtgagtgaagcagacgctcgcttatggctgcagcagctagaagaaaaaggccgatacgcaaaagacgtgtgggctggg

SEQ ID NO: 710 - protein, 1049 aa, synthetic construct
  REGION 1..1049: note = Variant of cytochrome P450
MTIKEMPQPKTFGELKNLPLLNTDKPVQALMRIADELGEIFKFEAPGSVTRFLSSQRLIKEACDERRFDKNLSQGLKFARDFLGDGLFTSWTHEPNWKKAHNILGPSFSQLAMKRYHAMMVDIAVQLVQKWERLNADEHIEVSEDMTRLTLDTIGLCGFNYRFNSFYRDQPHPFIVSVEGALDEVMNKLQRANPDDPAYDENKRQCQEDIKVMNDYVDKIIADRKARGEQSHDLLTQMLNGKDPETGEPLDDGNIRYQIITFLIAGHETTSGLLSFALYFLVKNPHVLQKVAEEAARVLVDPVPSYKQVKQLKYVGMVLNEALRLWPTAPAFSLYAKEDTVLGGEYPLTKGDEVMVLIPQLHRDKTIWGDDVEEFRPERFENPSAIPQHAFKPFGNGQRACIGWQFALHEATLVLGMMLKHFDFEDHTNYELVIKEKLTLKPEGFVVKAKSKGIPLGLIPSPSTEQSAKKVRKKAENAHNTPLLVLYGSNAGTAEGTARDLADIAMSKGFAPQVATLDSHAGNLPREGAVLIVTASYNGHPPDNAKQFVDWLDQASADEVKGVRYSVFGCGDKNWAATYQKVPAFIDETLAAKGAENIADRGEADASDDFEGAYEEWSDHMWSDVAAYFNLDIENSEDNKSTLSLQFVDSAADMPLAKMHGAFSTNVVASKELQQPGSARSTRHLEIELPKEASYQEGDHLGVIPRNYEGIVNRVTARFGLSASQQIRLEAEEEKLAHLPLAKTVSVEELLQYVELQDPVTRTQLRAMAAKTVCPPHKVELEALLEKQAYKEQVLAKRLTMLELLEKYPACEMKFSEFIALLPSIRPRYYSISSSPRVDEKQASITVSVVSGPAWSGYGEYKGIASNYLAELQEGDTITCFISTDQSEFTLPKDPETPLIMVGPGTGVAPFRGFVQARKQLKEQGQSLGEAHLYFGCRSPHEDYLYQEELENAQSEGIITLHTAFSRMPNQPKTYVQHVMEQDGKKLIELLDQGAHFYICGDGSQMAPAVEATLMKSYADVHQVSEADARLWLQQLEEKGRYAKDVWAG

SEQ ID NO: 711 - DNA, 3147 bp, synthetic construct
  misc_feature 1..3147: note = Variant of cytochrome P450
  source 1..3147: mol_type = other DNA
atgacaattaaggaaatgcctcagcctaagacgtttggagaacttaaaaatttaccgttattaaacacagataaaccggttcaagctttgatgcgtattgcggatgaattaggagaaatctttaaattcgaggcgcctggtagcgtaacgcgctttttatcaagtcagcgtctaattaaagaagcatgcgatgaaagccgctttgataaaaacttaagtcaaggccttaaatttgcacgtgattttcttggagacgggttatttacaagctggacgcatgaaccgaattggaaaaaagcgcataatatcttaggcccaagctttagtcagctggcaatgaagcgttatcatgcgatgatggtcgatatcgccgtgcagcttgttcaaaagtgggagcgtctaaatgcagatgagcatattgaagtatcggaagacatgacacgtttaacgctggatacaattggtctttgcggcttcaactatcgctttaacagcttttaccgagatcagcctcatccatttattgtgagtgttgagggtgcactggatgaagtaatgaacaagctgcagcgagcaaatccagacgacccagcttatgatgaaaacaagcgccagtgtcaagaagacatcaaggtgatgaacgactatgtcgataaaattattgcagatcgcaaagcaaggggtgaacaaagccatgatttattaacgcagatgctaaacggaaaagatccagaaacgggtgagccgcttgatgacgggaacattcgttatcaaattattacattcttaattgcgggacacgaaacaacaagtggtcttttatcatttgcgctgtatttcttagtgaaaaatccacatgtattacaaaaagtagcagaagaagcagcacgagttctagtagatcctgttccaagctacaaacaagtcaaacagcttaaatatgtcggcatggtcttaaacgaagcgctgcgcttatggccaactgctcctgcgttttccctatatgcaaaagaagatacggtacttggaggagaatatcctttaaccaaaggcgacgaagtaatggttctgattcctcagcttcaccgtgataaaacaatttggggagacgatgtggaggagttccgtccagagcgttttgaaaatccaagtgcgattccgcagcatgcgtttaaaccgtttggaaacggtcagcgtgcgtgtatcggttggcagttcgctcttcatgaagcaacgctggtacttggtatgatgctaaaacactttgactttgaagatcatacaaactacgagctcgttattaaagaaaagttaacgttaaaacctgaaggctttgtggtaaaagcaaaatcgaaaggcattccgcttggcctgattccttcacctagcactgaacagtctgctaaaaaagtacgcaaaaaggcagaaaacgctcataatacgccgctgcttgtgctatacggttcaaatgcgggaacagctgaaggaacggcgcgtgatttagcagatattgcaatgagcaaaggatttgcaccgcaggtcgcaacgcttgattcacacgccggaaatcttccgcgcgaaggagctgtattaattgtaacggcgtcttataacggtcatccgcctgataacgcaaagcagtttgtcgactggttagaccaagcgtctgctgatgaagtaaaaggcgttcgctactccgtatttggatgcggcgataaaaactgggctgcgacgtatcaaaaagtgcctgcttttatcgatgaaacgcttgccgctaaaggggcagaaaacatcgctgaccgcggtgaagcagatgcaagcgacgactttgaaggcgcgtatgaagaatggagtgatcatatgtggagtgacgtagcagcctactttaacctcgacattgaaaacagtgaagataataaatctactctttcacttcaatttgtcgacagcgccgcggatatgccgcttgcgaaaatgcacggtgcgttttcaacgaacgtcgtagcaagcaaagaacttcaacagccaggcagtgcacgaagcacgcgacatcttgaaattgaacttccaaaagaagcttcttatcaagaaggagatcatttaggtgttattcctcgcaactatgaaggaatagtaaaccgtgtaacagcaaggttcggcctaagcgcatcacagcaaatccgtctggaagcagaagaagaaaaattagctcatttgccactcgctaaaacagtatccgtagaagagcttctgcaatacgtggagcttcaagatcctgttacgcgcacgcagcttcgcgcaatggctgctaaaacggtctgcccgccgcataaagtagagcttgaagccttgcttgaaaagcaagcctacaaagaacaagtgctggcaaaacgtttaacaatgcttgaactgcttgaaaaatacccggcgtgtgaaatgaaattcagcgaatttatcgcccttctgccaagcatacgcccgcgctattactcgatttcttcatcacctcgtgtcgatgaaaaacaagcaagcatcacggtcagcgttgtctcaggaccggcgtggagcggatatggagaatataaaggaattgcgtcgaactatcttgccgagctgcaagaaggagatacgattacgtgctttatttccacagatcagtcagaatttacgctgccaaaagaccctgaaacgccgcttatcatggtcggaccgggaacaggcgtcgcgccgtttagaggctttgtgcaggcgcgcaaacagctaaaagaacaaggacagtcacttggagaagcacatttatacttcggctgccgttcacctcatgaagactatctgtatcaagaagagcttgaaaacgcccaaagcgaaggcatcattacgcttcataccgctttttctcgcatgccaaatcagccgaaaacatacgttcagcacgtaatggaacaagacggcaagaaattgattgaacttcttgatcaaggagcgcacttctatatttgcggagacggaagccaaatggcacctgccgttgaagcaacgcttatgaaaagctatgctgacgttcaccaagtgagtgaagcagacgctcgcttatggctgcagcagctagaagaaaaaggccgatacgcaaaagacgtgtgggctggg

SEQ ID NO: 712 - protein, 1049 aa, synthetic construct
  REGION 1..1049: note = Variant of cytochrome P450
MTIKEMPQPKTFGELKNLPLLNTDKPVQALMRIADELGEIFKFEAPGSVTRFLSSQRLIKEACDESRFDKNLSQGLKFARDFLGDGLFTSWTHEPNWKKAHNILGPSFSQLAMKRYHAMMVDIAVQLVQKWERLNADEHIEVSEDMTRLTLDTIGLCGFNYRFNSFYRDQPHPFIVSVEGALDEVMNKLQRANPDDPAYDENKRQCQEDIKVMNDYVDKIIADRKARGEQSHDLLTQMLNGKDPETGEPLDDGNIRYQIITFLIAGHETTSGLLSFALYFLVKNPHVLQKVAEEAARVLVDPVPSYKQVKQLKYVGMVLNEALRLWPTAPAFSLYAKEDTVLGGEYPLTKGDEVMVLIPQLHRDKTIWGDDVEEFRPERFENPSAIPQHAFKPFGNGQRACIGWQFALHEATLVLGMMLKHFDFEDHTNYELVIKEKLTLKPEGFVVKAKSKGIPLGLIPSPSTEQSAKKVRKKAENAHNTPLLVLYGSNAGTAEGTARDLADIAMSKGFAPQVATLDSHAGNLPREGAVLIVTASYNGHPPDNAKQFVDWLDQASADEVKGVRYSVFGCGDKNWAATYQKVPAFIDETLAAKGAENIADRGEADASDDFEGAYEEWSDHMWSDVAAYFNLDIENSEDNKSTLSLQFVDSAADMPLAKMHGAFSTNVVASKELQQPGSARSTRHLEIELPKEASYQEGDHLGVIPRNYEGIVNRVTARFGLSASQQIRLEAEEEKLAHLPLAKTVSVEELLQYVELQDPVTRTQLRAMAAKTVCPPHKVELEALLEKQAYKEQVLAKRLTMLELLEKYPACEMKFSEFIALLPSIRPRYYSISSSPRVDEKQASITVSVVSGPAWSGYGEYKGIASNYLAELQEGDTITCFISTDQSEFTLPKDPETPLIMVGPGTGVAPFRGFVQARKQLKEQGQSLGEAHLYFGCRSPHEDYLYQEELENAQSEGIITLHTAFSRMPNQPKTYVQHVMEQDGKKLIELLDQGAHFYICGDGSQMAPAVEATLMKSYADVHQVSEADARLWLQQLEEKGRYAKDVWAG

SEQ ID NO: 713 - DNA, 3147 bp, synthetic construct
  misc_feature 1..3147: note = Variant of cytochrome P450
  source 1..3147: mol_type = other DNA
atgacaattaaggaaatgcctcagcctaagacgtttggagaacttaaaaatttaccgttattaaacacagataaaccggttcaagctttgatgcgtattgcggatgaattaggagaaatctttaaattcgaggcgcctggtagcgtaacgcgctttttatcaagtcagcgtctaattaaagaagcatgcgatgaatcacgctttgataaaaacttaagtcaaggccttaaatttgcacgtgattttcttggagacgggttatttacaagctggacgcatgaaccgaattggaaaaaagcgcataatatcttaggcccaagctttagtcagcgtgcaatgaaacgttatcatgcgatgatggtcgatatcgccgtgcagcttgttcaaaagtgggagcgtctaaatgcagatgagcatattgaagtatcggaagacatgacacgtttaacgctggatacaattggtctttgcggcttcaactatcgctttaacagcttttaccgagatcagcctcatccatttattgtgagtgttgagggtgcactggatgaagtaatgaacaagctgcagcgagcaaatccagacgacccagcttatgatgaaaacaagcgccagtgtcaagaagacatcaaggtgatgaacgactatgtcgataaaattattgcagatcgcaaagcaaggggtgaacaaagccatgatttattaacgcagatgctaaacggaaaagatccagaaacgggtgagccgcttgatgacgggaacattcgttatcaaattattacattcttaattgcgggacacgaaacaacaagtggtcttttatcatttgcgctgtatttcttagtgaaaaatccacatgtattacaaaaagtagcagaagaagcagcacgagttctagtagatcctgttccaagctacaaacaagtcaaacagcttaaatatgtcggcatggtcttaaacgaagcgctgcgcttatggccaactgctcctgcgttttccctatatgcaaaagaagatacggtgcttggaggagaatatcctttaaccaaaggcgacgaagtaatggttctgattcctcagcttcaccgtgataaaacaatttggggagacgatgtggaggagttccgtccagagcgttttgaaaatccaagtgcgattccgcagcatgcgtttaaaccgtttggaaacggtcagcgtgcgtgtatcggttggcagttcgctcttcatgaagcaacgctggtacttggtatgatgctaaaacactttgactttgaagatcatacaaactacgagctcgttattaaagaaaagttaacgttaaaacctgaaggctttgtggtaaaagcaaaatcgaaaggcattccgcttggcctgattccttcacctagcactgaacagtctgctaaaaaagtacgcaaaaaggcagaaaacgctcataatacgccgctgcttgtgctatacggttcaaatgcgggaacagctgaaggaacggcgcgtgatttagcagatattgcaatgagcaaaggatttgcaccgcaggtcgcaacgcttgattcacacgccggaaatcttccgcgcgaaggagctgtattaattgtaacggcgtcttataacggtcatccgcctgataacgcaaagcaatttgtcgactggttagaccaagcgtctgctgatgaagtaaaaggcgttcgctactccgtatttggatgcggcgataaaaactgggctgcgacgtatcaaaaagtgcctgcttttatcgatgaaacgcttgccgctaaaggggcagaaaacatcgctgaccgcggttttgcagatgcaagcgacgactttgaaggcgcgtatgaagaatggagtgatcatatgtggagtgacgtagcagcctactttaacctcgacattgaaaacagtgaagataataaatctactctttcacttcaatttgtcgacagcgccgcggatatgccgcttgcgaaaatgcacggtgcgttttcaacgaacgtcgtagcaagcaaagaacttcaacagccaggcagtgcacgaagcacgcgacatcttgaaattgaacttccaaaagaagcttcttatcaagaaggagatcatttaggtgttattcctcgcaactatgaaggaatagtaaaccgtgtaacagcaaggttcggcctaagcgcatcacagcaaatccgtctggaagcagaagaagaaaaattagctcatttgccactcgctaaaacagtatccgtagaagagcttctgcaatacgtggagcttcaagatcctgttacgcgcacgcagcttcgcgcaatggctgctaaaacggtctgcccgccgcataaagtagagcttgaagccttgcttgaaaagcaagcctacaaagaacaagtgctggcaaaacgtttaacaatgcttgaactgcttgaaaaatacccggcgtgtgaaatgaaattcagcgaatttatcgcccttctgccaagcatacgcccgcgctattactcgatttcttcatcacctcgtgtcgatgaaaaacaagcaagcatcacggtcagcgttgtctcaggaccggcgtggagcggatatggagaatataaaggaattgcgtcgaactatcttgccgagctgcaagaaggagatacgattacgtgctttatttccacagatcagtcagaatttacgctgccaaaagaccctgaaacgccgcttatcatggtcggaccgggaacaggcgtcgcgccgtttagaggctttgtgcaggcgcgcaaacagctaaaagaacaaggacagtcacttggagaagcacatttatacttcggctgccgttcacctcatgaagactatctgtatcaagaagagcttgaaaacgcccaaagcgaaggcatcattacgcttcataccgctttttctcgcatgccaaatcagccgaaaacatacgttcagcacgtaatggaacaagacggcaagaaattgattgaacttcttgatcaaggagcgcacttctatatttgcggagacggaagccaaatggcacctgccgttgaagcaacgcttatgaaaagctatgctgacgttcaccaagtgagtgaagcagacgctcgcttatggctgcagcagctagaagaaaaaggccgatacgcaaaagacgtgtgggctggg

SEQ ID NO: 714 - protein, 1049 aa, synthetic construct
  REGION 1..1049: note = Variant of cytochrome P450
MTIKEMPQPKTFGELKNLPLLNTDKPVQALMRIADELGEIFKFEAPGSVTRFLSSQRLIKEACDESRFDKNLSQGLKFARDFLGDGLFTSWTHEPNWKKAHNILGPSFSQRAMKRYHAMMVDIAVQLVQKWERLNADEHIEVSEDMTRLTLDTIGLCGFNYRFNSFYRDQPHPFIVSVEGALDEVMNKLQRANPDDPAYDENKRQCQEDIKVMNDYVDKIIADRKARGEQSHDLLTQMLNGKDPETGEPLDDGNIRYQIITFLIAGHETTSGLLSFALYFLVKNPHVLQKVAEEAARVLVDPVPSYKQVKQLKYVGMVLNEALRLWPTAPAFSLYAKEDTVLGGEYPLTKGDEVMVLIPQLHRDKTIWGDDVEEFRPERFENPSAIPQHAFKPFGNGQRACIGWQFALHEATLVLGMMLKHFDFEDHTNYELVIKEKLTLKPEGFVVKAKSKGIPLGLIPSPSTEQSAKKVRKKAENAHNTPLLVLYGSNAGTAEGTARDLADIAMSKGFAPQVATLDSHAGNLPREGAVLIVTASYNGHPPDNAKQFVDWLDQASADEVKGVRYSVFGCGDKNWAATYQKVPAFIDETLAAKGAENIADRGFADASDDFEGAYEEWSDHMWSDVAAYFNLDIENSEDNKSTLSLQFVDSAADMPLAKMHGAFSTNVVASKELQQPGSARSTRHLEIELPKEASYQEGDHLGVIPRNYEGIVNRVTARFGLSASQQIRLEAEEEKLAHLPLAKTVSVEELLQYVELQDPVTRTQLRAMAAKTVCPPHKVELEALLEKQAYKEQVLAKRLTMLELLEKYPACEMKFSEFIALLPSIRPRYYSISSSPRVDEKQASITVSVVSGPAWSGYGEYKGIASNYLAELQEGDTITCFISTDQSEFTLPKDPETPLIMVGPGTGVAPFRGFVQARKQLKEQGQSLGEAHLYFGCRSPHEDYLYQEELENAQSEGIITLHTAFSRMPNQPKTYVQHVMEQDGKKLIELLDQGAHFYICGDGSQMAPAVEATLMKSYADVHQVSEADARLWLQQLEEKGRYAKDVWAG

SEQ ID NO: 715 - DNA, 3147 bp, synthetic construct
  misc_feature 1..3147: note = Variant of cytochrome P450
  source 1..3147: mol_type = other DNA
atgacaattaaggaaatgcctcagcctaagacgtttggagaacttaaaaatttaccgttattaaacacagataaaccggttcaagctttgatgcgtattgcggatgaattaggagaaatctttaaattcgaggcgcctggtagcgtaacgcgctttttatcaagtcagcgtctaattaaagaagcatgcgatgaacgccgctttgataaaaacttaagtcaaggccttaaatttgcacgtgattttcttggagacgggttatttacaagctggacgcatgaaccgaattggaaaaaagcgcataatatcttaggcccaagctttagtcagcacgcaatgaagcgttatcatgcgatgatggtcgatatcgccgtgcagcttgttcaaaagtgggagcgtctaaatgcagatgagcatattgaagtatcggaagacatgacacgtttaacgctggatacaattggtctttgcggcttcaactatcgctttaacagcttttaccgagatcagctgcatccatttattgtgagtgttgagggtgcactggatgaagtaatgaacaagctgcagcgagcaaatccagacgacccagcttatgatgaaaacaagcgccagtgtcaagaagacatcaaggtgatgaacgactatgtcgataaaattattgcagatcgcaaagcaaggggtgaacaaagccatgatttattaacgcagatgctaaacggaaaagatccagcaacgggtgagccgcttgatgacgggaacattcgttatcaaattatcacattcttaattgcgggacacgaaacaacaagtggtcttttatcatttgcgctgtatttcttagtgaaaaatccacatgtattacaaaaagtagcagaagaagcagcacgagttctagtagatcctgttccaagctacaaacaagtcaaacagcttaaatatgtcggcatggtcttaaacgaagcgctgcgcttatggccaactgctcctgcgttttccctatatgcaaaagaagatacggtgcttggaggagaatatcctttaaccaaaggcgacgaagtaatggttctgattcctcagcttcaccgtgataaaacaatttggggagacgatgtggaggagttccgtccagagcgttttgaaaatccaagtgcgattccgcagcatgcgtttaaaccgtttggaaacggtcagcgtgcgtgtatcggttggcagttcgctcttcatgaagcaaccctggtacttggtatgatgctaaaacactttgactttgaagatcatacaaactacgagctcgttattaaagaaaagttaacgttaaaacctgaaggctttgtggtaaaagcaaaatcgaaaggcattccgcttggcctgattccttcacctagcactgaacagtctgctaaaaaagtacgcaaaaaggcagaaaacgctcataatacgccgctgcttgtgctatacggttcaaatgcgggaacagctgaaggaacggcgcgtgatttagcagatattgcaatgagcaaaggatttgcaccgcaggtcgcaacgcttgattcacacgccggaaatcttccgcgcgaaggagctgtattaattgtaacggcgtcttataacggtcatccgcctgataacgcaaagagttttgtcgactggttagaccaagcgtctgctgatgaagtaaaaggcgttcgctactccgtatttggatgcggcgataaaaactgggctgcgacgtatcaaaaagtgcctgcttttatcgatgaaacgcttgccgctaaaggggcagaaaacatcgctgaccgcggtgaagcagatgcaagcgacgactttgaaggcgcgtatgaagaatggagtgatcatatgtggagtgacgtagcagcctactttaacctcgacattgaaaacagtgaagataataaatctactctttcacttcaatttgtcgacagcgccgcggatatgccgcttgcgaaaatgcacggtgcgttttcaacgaacgtcgtagcaagcaaagaacttcaacagccaggcagtgcacgaagcacgcgacatcttgaaattgaacttccaaaagaagcttcttatcaagaaggagatcatttaggtgttattcctcgcaactatgaaggaatagtaaaccgtgtaacagcaaggttcggcctaagcgcatcacagcaaatccgtctggaagcagaagaagaaaaattagctcatttgccactcgctaaaacagtatccgtagaagagcttctgcaatacgtggagcttcaagatcctgttacgcgcacgcagcttcgcgcaatggctgctaaaacggtctgcccgccgcataaagtagagcttgaagccttgcttgaaaagcaagcctacaaagaacaagtgctggcaaaacgtttaacaatgcttgaactgcttgaaaaatacccggcgtgtgaaatgaaattcagcgaatttatcgcccttctgccaagcatacgcccgcgctattactcgatttcttcatcacctcgtgtcgatgaaaaacaagcaagcatcacggtcagcgttgtctcaggaccggcgtggagcggatatggagaatataaaggaattgcgtcgaactatcttgccgagctgcaagaaggagatacgattacgtgctttatttccacagatcagtcagaatttacgctgccaaaagaccctgaaacgccgcttatcatggtcggaccgggaacaggcgtcgcgccgtttagaggctttgtgcaggcgcgcaaacagctaaaagaacaaggacagtcacttggagaagcacatttatacttcggctgccgttcacctcatgaagactatctgtatcaagaagagcttgaaaacgcccaaagcgaaggcatcattacgcttcataccgctttttctcgcatgccaaatcagccgaaaacatacgttcagcacgtaatggaacaagacggcaagaaattgattgaacttcttgatcaaggagcgcacttctatatttgcggagacggaagccaaatggcacctgccgttgaagcaacgcttatgaaaagctatgctgacgttcaccaagtgagtgaagcagacgctcgcttatggctgcagcagctagaagaaaaaggccgatacgcaaaagacgtgtgggctggg

SEQ ID NO: 716 - protein, 1049 aa, synthetic construct
  REGION 1..1049: note = Variant of cytochrome P450
MTIKEMPQPKTFGELKNLPLLNTDKPVQALMRIADELGEIFKFEAPGSVTRFLSSQRLIKEACDERRFDKNLSQGLKFARDFLGDGLFTSWTHEPNWKKAHNILGPSFSQHAMKRYHAMMVDIAVQLVQKWERLNADEHIEVSEDMTRLTLDTIGLCGFNYRFNSFYRDQLHPFIVSVEGALDEVMNKLQRANPDDPAYDENKRQCQEDIKVMNDYVDKIIADRKARGEQSHDLLTQMLNGKDPATGEPLDDGNIRYQIITFLIAGHETTSGLLSFALYFLVKNPHVLQKVAEEAARVLVDPVPSYKQVKQLKYVGMVLNEALRLWPTAPAFSLYAKEDTVLGGEYPLTKGDEVMVLIPQLHRDKTIWGDDVEEFRPERFENPSAIPQHAFKPFGNGQRACIGWQFALHEATLVLGMMLKHFDFEDHTNYELVIKEKLTLKPEGFVVKAKSKGIPLGLIPSPSTEQSAKKVRKKAENAHNTPLLVLYGSNAGTAEGTARDLADIAMSKGFAPQVATLDSHAGNLPREGAVLIVTASYNGHPPDNAKSFVDWLDQASADEVKGVRYSVFGCGDKNWAATYQKVPAFIDETLAAKGAENIADRGEADASDDFEGAYEEWSDHMWSDVAAYFNLDIENSEDNKSTLSLQFVDSAADMPLAKMHGAFSTNVVASKELQQPGSARSTRHLEIELPKEASYQEGDHLGVIPRNYEGIVNRVTARFGLSASQQIRLEAEEEKLAHLPLAKTVSVEELLQYVELQDPVTRTQLRAMAAKTVCPPHKVELEALLEKQAYKEQVLAKRLTMLELLEKYPACEMKFSEFIALLPSIRPRYYSISSSPRVDEKQASITVSVVSGPAWSGYGEYKGIASNYLAELQEGDTITCFISTDQSEFTLPKDPETPLIMVGPGTGVAPFRGFVQARKQLKEQGQSLGEAHLYFGCRSPHEDYLYQEELENAQSEGIITLHTAFSRMPNQPKTYVQHVMEQDGKKLIELLDQGAHFYICGDGSQMAPAVEATLMKSYADVHQVSEADARLWLQQLEEKGRYAKDVWAG

SEQ ID NO: 717 - DNA, 3147 bp, synthetic construct
  misc_feature 1..3147: note = Variant of cytochrome P450
  source 1..3147: mol_type = other DNA
atgacaattaaggaaatgcctcagcctaagacgtttggagaacttaaaaatttaccgttattaaacacagataaaccggttcaagctttgatgcgtattgcggatgaattaggagaaatctttaaattcgaggcgcctggtagcgtaacgcgctttttatcaagtcagcgtctaattaaagaagcatgcgatgaaagccgctttgataaaaacttaagtcaaggccttaaatttgcacgtgattttcttggagacgggttatttacaagctggacgcatgaaccgaattggaaaaaagcgcataatatcttaggcccaagctttagtcagctggcaatgcgccgttatcatgcgatgatggtcgatatcgccgtgcagcttgttcaaaagtgggagcgtctaaatgcagatgagcatattgaagtatcggaagacatgacacgtttaacgctggatacaattggtctttgcggcttcaactatcgctttaacagcttttaccgagatcagcctcatccatttattgtgagtgttgagggtgcactggatgaagtaatgaacaagctgcagcgagcaaatccagacgacccagcttatgatgaaaacaagcgccagtgtcaagaagacatcaaggtgatgaacgactatgtcgataaaattattgcagatcgcaaagcaaggggtgaacaaagccatgatttattaacgcagatgctaaacggaaaagatccagcaacgggtgagccgcttgatgacgggaacattcgttatcaaattattacattcttaattgcgggacacgaaacaacaagtggtcttttatcatttgcgctgtatttcttagtgaaaaatccacatgtattacaaaaagtagcagaagaagcagcacgagttctagtagatcctgttccaagctacaaacaagtcaaacagcttaaatatgtcggcatggtcttaaacgaagcgctgcgcttatggccaactgctcctgcgttttccctatatgcaaaagaagatacggtgcttggaggagaatatcctttaaccaaaggcgacgaagtaatggttctgattcctcagcttcaccgtgataaaacaatttggggagacgattcggaggaattccgtccagagcgttttgaaaatccaagtgcgattccgcagcatgcgtttaaaccgtttggaaacggtcagcgtgcgtgtatcggttggcagttcgctcttcatgaagcaaccctggtacttggtatgatgctaaaacactttgactttgaagatcatacaaactacgagctcgttattaaagaaaagttaacgttaaaacctgaaggctttgtggtaaaagcaaaatcgaaaggcattccgcttggcctgattccttcacctagcactgaacagtctgctaaaaaagtacgcaaaaaggcagaaaacgctcataatacgccgctgcttgtgctatacggttcaaatgcgggaacagctgaaggaacggcgcgtgatttagcagatattgcaatgagcaaaggatttgcaccgcaggtcgcaacgcttgattcacacgccggaaatcttccgcgcgaaggagctgtattaattgtaacggcgtcttataacggtcatccgcctgataacgcaaagcagtttgtcgactggttagaccaagcgtctgctgatgaagtaaaaggcgttcgctactccgtatttggatgcggcgataaaaactgggctgcgacgtatcaaaaagtgcctgcttttatcgatgaaacgcttgccgctaaaggggcagaaaacatcgctgaccgcggtgaagcagatgcaagcgacgactttgaaggcgcgtatgaagaatggagtgatcatatgtggagtgacgtagcagcctactttaacctcgacattgaaaacagtgaagataataaatctactctttcacttcaatttgtcgacagcgccgcggatatgccgcttgcgaaaatgcacggtgcgttttcaacgaacgtcgtagcaagcaaagaacttcaacagccaggcagtgcacgaagcacgcgacatcttgaaattgaacttccaaaagaagcttcttatcaagaaggagatcatttaggtgttattcctcgcaactatgaaggaatagtaaaccgtgtaacagcaaggttcggcctaagcgcatcacagcaaatccgtctggaagcagaagaagaaaaattagctcatttgccactcgctaaaacagtatccgtagaagagcttctgcaatacgtggagcttcaagatcctgttacgcgcacgcagcttcgcgcaatggctgctaaaacggtctgcccgccgcataaagtagagcttgaagccttgcttgaaaagcaagcctacaaagaacaagtgctggcaaaacgtttaacaatgcttgaactgcttgaaaaatacccggcgtgtgaaatgaaattcagcgaatttatcgcccttctgccaagcatacgcccgcgctattactcgatttcttcatcacctcgtgtcgatgaaaaacaagcaagcatcacggtcagcgttgtctcaggaccggcgtggagcggatatggagaatataaaggaattgcgtcgaactatcttgccgagctgcaagaaggagatacgattacgtgctttatttccacagatcagtcagaatttacgctgccaaaagaccctgaaacgccgcttatcatggtcggaccgggaacaggcgtcgcgccgtttagaggctttgtgcaggcgcgcaaacagctaaaagaacaaggacagtcacttggagaagcacatttatacttcggctgccgttcacctcatgaagactatctgtatcaagaagagcttgaaaacgcccaaagcgaaggcatcattacgcttcataccgctttttctcgcatgccaaatcagccgaaaacatacgttcagcacgtaatggaacaagacggcaagaaattgattgaacttcttgatcaaggagcgcacttctatatttgcggagacggaagccaaatggcacctgccgttgaagcaacgcttatgaaaagctatgctgacgttcaccaagtgagtgaagcagacgctcgcttatggctgcagcagctagaagaaaaaggccgatacgcaaaagacgtgtgggctggg

SEQ ID NO: 718 - protein, 1049 aa, synthetic construct
  REGION 1..1049: note = Variant of cytochrome P450
MTIKEMPQPKTFGELKNLPLLNTDKPVQALMRIADELGEIFKFEAPGSVTRFLSSQRLIKEACDESRFDKNLSQGLKFARDFLGDGLFTSWTHEPNWKKAHNILGPSFSQLAMRRYHAMMVDIAVQLVQKWERLNADEHIEVSEDMTRLTLDTIGLCGFNYRFNSFYRDQPHPFIVSVEGALDEVMNKLQRANPDDPAYDENKRQCQEDIKVMNDYVDKIIADRKARGEQSHDLLTQMLNGKDPATGEPLDDGNIRYQIITFLIAGHETTSGLLSFALYFLVKNPHVLQKVAEEAARVLVDPVPSYKQVKQLKYVGMVLNEALRLWPTAPAFSLYAKEDTVLGGEYPLTKGDEVMVLIPQLHRDKTIWGDDSEEFRPERFENPSAIPQHAFKPFGNGQRACIGWQFALHEATLVLGMMLKHFDFEDHTNYELVIKEKLTLKPEGFVVKAKSKGIPLGLIPSPSTEQSAKKVRKKAENAHNTPLLVLYGSNAGTAEGTARDLADIAMSKGFAPQVATLDSHAGNLPREGAVLIVTASYNGHPPDNAKQFVDWLDQASADEVKGVRYSVFGCGDKNWAATYQKVPAFIDETLAAKGAENIADRGEADASDDFEGAYEEWSDHMWSDVAAYFNLDIENSEDNKSTLSLQFVDSAADMPLAKMHGAFSTNVVASKELQQPGSARSTRHLEIELPKEASYQEGDHLGVIPRNYEGIVNRVTARFGLSASQQIRLEAEEEKLAHLPLAKTVSVEELLQYVELQDPVTRTQLRAMAAKTVCPPHKVELEALLEKQAYKEQVLAKRLTMLELLEKYPACEMKFSEFIALLPSIRPRYYSISSSPRVDEKQASITVSVVSGPAWSGYGEYKGIASNYLAELQEGDTITCFISTDQSEFTLPKDPETPLIMVGPGTGVAPFRGFVQARKQLKEQGQSLGEAHLYFGCRSPHEDYLYQEELENAQSEGIITLHTAFSRMPNQPKTYVQHVMEQDGKKLIELLDQGAHFYICGDGSQMAPAVEATLMKSYADVHQVSEADARLWLQQLEEKGRYAKDVWAG

SEQ ID NO: 719 - DNA, 3147 bp, synthetic construct
  misc_feature 1..3147: note = Variant of cytochrome P450
  source 1..3147: mol_type = other DNA
atgacaattaaggaaatgcctcagcctaagacgtttggagaacttaaaaatttaccgttattaaacacagataaaccggttcaagctttgatgcgtattgcggatgaattaggagaaatctttaaattcgaggcgcctggtagcgtaacgcgctttttatcaagtcagcgtctaattaaagaagcatgcgatgaatcacgctttgataaaaacttaagtcaaggccttaaatttgcacgtgattttcttggagacgggttatttacaagctggacgcatgaaccgaattggaaaaaagcgcataatatcttaggcccaagctttagtcagcgtgcaatgaaacgttatcatgcgatgatggtcgatatcgccgtgcagcttgttcaaaagtgggagcgtctaaatgcagatgagcatattgaagtatcggaagacatgacacgtttaacgctggatacaattggtctttgcggcttcaactatcgctttaacagcttttaccgagatcagcctcatccatttattgtgagtgttgagggtgcactggatgaagtaatgaacaagctgcagcgagcaaatccagacgacccagcttatgatgaaaacaagcgccagtgtcaagaagacatcaaggtgatgaacgactatgtcgataaaattattgcagatcgcaaagcaaggggtgaacaaagccatgatttattaacgcagatgctaaacggaaaagatccagaaacgggtgagccgcttgatgacgggaacattcgttatcaaattattacattcttaattgcgggacacgaaacaacaagtggtcttttatcatttgcgctgtatttcttagtgaaaaatccacatgtattacaaaaagtagcagaagaagcagcacgagttctagtagatcctgttccaagctacaaacaagtcaaacagcttaaatatgtcggcatggtcttaaacgaagcgctgcgcttatggccaactgctcctgcgttttccctatatgcaaaagaagatacggtgcttggaggagaatatcctttaaccaaaggcgacgaagtaatggttctgattcctcagcttcaccgtgataaaacaatttggggagacgatgtggaggagttccgtccagagcgttttgaaaatccaagtgcgattccgcagcatgcgtttaaaccgtttggaaacggtcagcgtgcgtgtatcggttggcagttcgctcttcatgaagcaacgctggtacttggtatgatgctaaaacactttgactttgaagatcatacaaactacgagctcgttattaaagaaaagttaacgttaaaacctgaaggctttgtggtaaaagcaaaatcgaaaggcattccgcttggcctgattccttcacctagcactgaacagtctgctaaaaaagtacgcaaaaaggcagaaaacgctcataatacgccgctgcttgtgctatacggttcaaatgcgggaacagctgaaggaacggcgcgtgatttagcagatattgcaatgagcaaaggatttgcaccgcaggtcgcaacgcttgattcacacgccggaaatcttccgcgcgaaggagctgtattaattgtaacggcgtcttataacggtcatccgcctgataacgcaaagcaatttgtcgactggttagaccaagcgtctgctgatgaagtaaaaggcgttcgctactccgtatttggatgcggcgataaaaactgggctgcgacgtatcaaaaagtgcctgcttttatcgatgaaacgcttgccgctaaaggggcagaaaacatcgctgacatgggtgaagcagatgcaagcgacgactttgaaggcgcgtatgaagaatggagtgatcatatgtggagtgacgtagcagcctactttaacctcgacattgaaaacagtgaagataataaatctactctttcacttcaatttgtcgacagcgccgcggatatgccgcttgcgaaaatgcacggtgcgttttcaacgaacgtcgtagcaagcaaagaacttcaacagccaggcagtgcacgaagcacgcgacatcttgaaattgaacttccaaaagaagcttcttatcaagaaggagatcatttaggtgttattcctcgcaactatgaaggaatagtaaaccgtgtaacagcaaggttcggcctaagcgcatcacagcaaatccgtctggaagcagaagaagaaaaattagctcatttgccactcgctaaaacagtatccgtagaagagcttctgcaatacgtggagcttcaagatcctgttacgcgcacgcagcttcgcgcaatggctgctaaaacggtctgcccgccgcataaagtagagcttgaagccttgcttgaaaagcaagcctacaaagaacaagtgctggcaaaacgtttaacaatgcttgaactgcttgaaaaatacccggcgtgtgaaatgaaattcagcgaatttatcgcccttctgccaagcatacgcccgcgctattactcgatttcttcatcacctcgtgtcgatgaaaaacaagcaagcatcacggtcagcgttgtctcaggaccggcgtggagcggatatggagaatataaaggaattgcgtcgaactatcttgccgagctgcaagaaggagatacgattacgtgctttatttccacagatcagtcagaatttacgctgccaaaagaccctgaaacgccgcttatcatggtcggaccgggaacaggcgtcgcgccgtttagaggctttgtgcaggcgcgcaaacagctaaaagaacaaggacagtcacttggagaagcacatttatacttcggctgccgttcacctcatgaagactatctgtatcaagaagagcttgaaaacgcccaaagcgaaggcatcattacgcttcataccgctttttctcgcatgccaaatcagccgaaaacatacgttcagcacgtaatggaacaagacggcaagaaattgattgaacttcttgatcaaggagcgcacttctatatttgcggagacggaagccaaatggcacctgccgttgaagcaacgcttatgaaaagctatgctgacgttcaccaagtgagtgaagcagacgctcgcttatggctgcagcagctagaagaaaaaggccgatacgcaaaagacgtgtgggctggg

SEQ ID NO: 720 - protein, 1049 aa, synthetic construct
  REGION 1..1049: note = Variant of cytochrome P450
MTIKEMPQPKTFGELKNLPLLNTDKPVQALMRIADELGEIFKFEAPGSVTRFLSSQRLIKEACDESRFDKNLSQGLKFARDFLGDGLFTSWTHEPNWKKAHNILGPSFSQRAMKRYHAMMVDIAVQLVQKWERLNADEHIEVSEDMTRLTLDTIGLCGFNYRFNSFYRDQPHPFIVSVEGALDEVMNKLQRANPDDPAYDENKRQCQEDIKVMNDYVDKIIADRKARGEQSHDLLTQMLNGKDPETGEPLDDGNIRYQIITFLIAGHETTSGLLSFALYFLVKNPHVLQKVAEEAARVLVDPVPSYKQVKQLKYVGMVLNEALRLWPTAPAFSLYAKEDTVLGGEYPLTKGDEVMVLIPQLHRDKTIWGDDVEEFRPERFENPSAIPQHAFKPFGNGQRACIGWQFALHEATLVLGMMLKHFDFEDHTNYELVIKEKLTLKPEGFVVKAKSKGIPLGLIPSPSTEQSAKKVRKKAENAHNTPLLVLYGSNAGTAEGTARDLADIAMSKGFAPQVATLDSHAGNLPREGAVLIVTASYNGHPPDNAKQFVDWLDQASADEVKGVRYSVFGCGDKNWAATYQKVPAFIDETLAAKGAENIADMGEADASDDFEGAYEEWSDHMWSDVAAYFNLDIENSEDNKSTLSLQFVDSAADMPLAKMHGAFSTNVVASKELQQPGSARSTRHLEIELPKEASYQEGDHLGVIPRNYEGIVNRVTARFGLSASQQIRLEAEEEKLAHLPLAKTVSVEELLQYVELQDPVTRTQLRAMAAKTVCPPHKVELEALLEKQAYKEQVLAKRLTMLELLEKYPACEMKFSEFIALLPSIRPRYYSISSSPRVDEKQASITVSVVSGPAWSGYGEYKGIASNYLAELQEGDTITCFISTDQSEFTLPKDPETPLIMVGPGTGVAPFRGFVQARKQLKEQGQSLGEAHLYFGCRSPHEDYLYQEELENAQSEGIITLHTAFSRMPNQPKTYVQHVMEQDGKKLIELLDQGAHFYICGDGSQMAPAVEATLMKSYADVHQVSEADARLWLQQLEEKGRYAKDVWAG

SEQ ID NO: 721 - DNA, 3147 bp, synthetic construct
  misc_feature 1..3147: note = Variant of cytochrome P450
  source 1..3147: mol_type = other DNA
atgacaattaaggaaatgcctcagcctaagacgtttggagaacttaaaaatttaccgttattaaacacagataaaccggttcaagctttgatgcgtattgcggatgaattaggagaaatctttaaattcgaggcgcctggtagcgtaacgcgctttttatcaagtcagcgtctaattaaagaagcatgcgatgaatcacgctttgataaaaacttaagtcaaggccttaaatttgcacgtgattttcttggagacgggttatttacaagctggacgcatgaaccgaattggaaaaaagcgcataatatcttaggcccaagctttagtcagcgtgcaatgaaacgttatcatgcgatgatggtcgatatcgccgtgcagcttgttcaaaagtgggagcgtctaaatgcagatgagcatattgaagtatcggaagacatgacacgtttaacgctggatacaattggtctttgcggcttcaactatcgctttaacagcttttaccgagatcagcctcatccatttattgtgagtgttgagggtgcactggatgaagtaatgaacaagctgcagcgagcaaatccagacgacccagcttatgatgaaaacaagcgccagtgtcaagaagacatcaaggtgatgaacgactatgtcgataaaattattgcagatcgcaaagcaaggggtgaacaaagccatgatttattaacgcagatgctaaacggaaaagatccagaaacgggtgagccgcttgatgacgggaacattcgttatcaaattattacattcttaattgcgggacacgaaacaacaagtggtcttttatcatttgcgctgtatttcttagtgaaaaatccacatgtattacaaaaagtagcagaagaagcagcacgagttctagtagatcctgttccaagctacaaacaagtcaaacagcttaaatatgtcggcatggtcttaaacgaagcgctgcgcttatggccaactgctcctgcgttttccctatatgcaaaagaagatacggtgcttggaggagaatatcctttaaccaaaggcgacgaagtaatggttctgattcctcagcttcaccgtgataaaacaatttggggagacgatgtggaggagttccgtccagagcgttttgaaaatccaagtgcgattccgcagcatgcgtttaaaccgtttggaaacggtcagcgtgcgtgtatcggttggcagttcgctcttcatgaagcaacgctggtacttggtatgatgctaaaacactttgactttgaagatcatacaaactacgagctcgttattaaagaaaagttaacgttaaaacctgaaggctttgtggtaaaagcaaaatcgaaaggcattccgcttggcctgattccttcacctagcactgaacagtctgctaaaaaagtacgcaaaaaggcagaaaacgctcataatacgccgctgcttgtgctatacggttcaaatgcgggaacagctgaaggaacggcgcgtgatttagcagatattgcaatgagcaaaggatttgcaccgcaggtcgcaacgcttgattcacacgccggaaatcttccgcgcgaaggagctgtattaattgtaacggcgtcttataacggtcatccgcctgataacgcaaagcaatttgtcgactggttagaccaagcgtctgctgatgaagtaaaaggcgttcgctactccgtatttggatgcggcgataaaaactgggctgcgacgtatcaaaaagtgcctgcttttatcgatgaaacgcttgccgctaaaggggcagaaaacatcgctgaccgcggtgaagcagatgcaagcgacgactttgaaggcgcgtatgaagaatggagtgatcatatgtggcaggacgtagcagcctactttaacctcgacattgaaaacagtgaagataataaatctactctttcacttcaatttgtcgacagcgccgcggatatgccgcttgcgaaaatgcacggtgcgttttcaacgaacgtcgtagcaagcaaagaacttcaacagccaggcagtgcacgaagcacgcgacatcttgaaattgaacttccaaaagaagcttcttatcaagaaggagatcatttaggtgttattcctcgcaactatgaaggaatagtaaaccgtgtaacagcaaggttcggcctaagcgcatcacagcaaatccgtctggaagcagaagaagaaaaattagctcatttgccactcgctaaaacagtatccgtagaagagcttctgcaatacgtggagcttcaagatcctgttacgcgcacgcagcttcgcgcaatggctgctaaaacggtctgcccgccgcataaagtagagcttgaagccttgcttgaaaagcaagcctacaaagaacaagtgctggcaaaacgtttaacaatgcttgaactgcttgaaaaatacccggcgtgtgaaatgaaattcagcgaatttatcgcccttctgccaagcatacgcccgcgctattactcgatttcttcatcacctcgtgtcgatgaaaaacaagcaagcatcacggtcagcgttgtctcaggaccggcgtggagcggatatggagaatataaaggaattgcgtcgaactatcttgccgagctgcaagaaggagatacgattacgtgctttatttccacagatcagtcagaatttacgctgccaaaagaccctgaaacgccgcttatcatggtcggaccgggaacaggcgtcgcgccgtttagaggctttgtgcaggcgcgcaaacagctaaaagaacaaggacagtcacttggagaagcacatttatacttcggctgccgttcacctcatgaagactatctgtatcaagaagagcttgaaaacgcccaaagcgaaggcatcattacgcttcataccgctttttctcgcatgccaaatcagccgaaaacatacgttcagcacgtaatggaacaagacggcaagaaattgattgaacttcttgatcaaggagcgcacttctatatttgcggagacggaagccaaatggcacctgccgttgaagcaacgcttatgaaaagctatgctgacgttcaccaagtgagtgaagcagacgctcgcttatggctgcagcagctagaagaaaaaggccgatacgcaaaagacgtgtgggctggg

SEQ ID NO: 722 - protein, 1049 aa, synthetic construct
  REGION 1..1049: note = Variant of cytochrome P450
MTIKEMPQPKTFGELKNLPLLNTDKPVQALMRIADELGEIFKFEAPGSVTRFLSSQRLIKEACDESRFDKNLSQGLKFARDFLGDGLFTSWTHEPNWKKAHNILGPSFSQRAMKRYHAMMVDIAVQLVQKWERLNADEHIEVSEDMTRLTLDTIGLCGFNYRFNSFYRDQPHPFIVSVEGALDEVMNKLQRANPDDPAYDENKRQCQEDIKVMNDYVDKIIADRKARGEQSHDLLTQMLNGKDPETGEPLDDGNIRYQIITFLIAGHETTSGLLSFALYFLVKNPHVLQKVAEEAARVLVDPVPSYKQVKQLKYVGMVLNEALRLWPTAPAFSLYAKEDTVLGGEYPLTKGDEVMVLIPQLHRDKTIWGDDVEEFRPERFENPSAIPQHAFKPFGNGQRACIGWQFALHEATLVLGMMLKHFDFEDHTNYELVIKEKLTLKPEGFVVKAKSKGIPLGLIPSPSTEQSAKKVRKKAENAHNTPLLVLYGSNAGTAEGTARDLADIAMSKGFAPQVATLDSHAGNLPREGAVLIVTASYNGHPPDNAKQFVDWLDQASADEVKGVRYSVFGCGDKNWAATYQKVPAFIDETLAAKGAENIADRGEADASDDFEGAYEEWSDHMWQDVAAYFNLDIENSEDNKSTLSLQFVDSAADMPLAKMHGAFSTNVVASKELQQPGSARSTRHLEIELPKEASYQEGDHLGVIPRNYEGIVNRVTARFGLSASQQIRLEAEEEKLAHLPLAKTVSVEELLQYVELQDPVTRTQLRAMAAKTVCPPHKVELEALLEKQAYKEQVLAKRLTMLELLEKYPACEMKFSEFIALLPSIRPRYYSISSSPRVDEKQASITVSVVSGPAWSGYGEYKGIASNYLAELQEGDTITCFISTDQSEFTLPKDPETPLIMVGPGTGVAPFRGFVQARKQLKEQGQSLGEAHLYFGCRSPHEDYLYQEELENAQSEGIITLHTAFSRMPNQPKTYVQHVMEQDGKKLIELLDQGAHFYICGDGSQMAPAVEATLMKSYADVHQVSEADARLWLQQLEEKGRYAKDVWAG

SEQ ID NO: 723 - DNA, 3147 bp, synthetic construct
  misc_feature 1..3147: note = Variant of cytochrome P450
  source 1..3147: mol_type = other DNA
atgacaattaaggaaatgcctcagcctaagacgtttggagaacttaaaaatttaccgttattaaacacagataaaccggttcaagctttgatgcgtattgcggatgaattaggagaaatctttaaattcgaggcgcctggtagcgtaacgcgctttttatcaagtcagcgtctaattaaagaagcatgcgatgaatcacgctttgataaaaacttaagtcaaggccttaaatttgcacgtgattttcttggagacgggttatttacaagctggacgcatgaaccgaattggaaaaaagcgcataatatcttaggcccaagctttagtcagcgtgcaatgaaacgttatcatgcgatgatggtcgatatcgccgtgcagcttgttcaaaagtgggagcgtctaaatgcagatgagcatattgaagtatcggaagacatgacacgtttaacgctggatacaattggtctttgcggcttcaactatcgctttaacagcttttaccgagatcagcctcatccatttattgtgagtgttgagggtgcactggatgaagtaatgaacaagctgcagcgagcaaatccagacgacccagcttatgatgaaaacaagcgccagtgtcaagaagacatcaaggtgatgaacgactatgtcgataaaattattgcagatcgcaaagcaaggggtgaacaaagccatgatttattaacgcagatgctaaacggaaaagatccagaaacgggtgagccgcttgatgacgggaacattcgttatcaaattattacattcttaattgcgggacacgaaacaacaagtggtcttttatcatttgcgctgtatttcttagtgaaaaatccacatgtattacaaaaagtagcagaagaagcagcacgagttctagtagatcctgttccaagctacaaacaagtcaaacagcttaaatatgtcggcatggtcttaaacgaagcgctgcgcttatggccaactgctcctgcgttttccctatatgcagaagaagatacggtgcttggaggagaatatcctttaaccaaaggcgacgaagtaatggttctgattcctcagcttcaccgtgataaaacaatttggggagacgatgtggaggagttccgtccagagcgttttgaaaatccaagtgcgattccgcagcatgcgtttaaaccgtttggaaacggtcagcgtgcgtgtatcggttggcagttcgctcttcatgaagcaacgctggtacttggtatgatgctaaaacactttgactttgaagatcatacaaactacgagctcgttattaaagaaaagttaacgttaaaacctgaaggctttgtggtaaaagcaaaatcgaaaggcattccgcttggcctgattccttcacctagcactgaacagtctgctaaaaaagtacgcaaaaaggcagaaaacgctcataatacgccgctgcttgtgctatacggttcaaatgcgggaacagctgaaggaacggcgcgtgatttagcagatattgcaatgagcaaaggatttgcaccgcaggtcgcaacgcttgattcacacgccggaaatcttccgcgcgaaggagctgtattaattgtaacggcgtcttataacggtcatccgcctgataacgcaaagcaatttgtcgactggttagaccaagcgtctgctgatgaagtaaaaggcgttcgctactccgtatttggatgcggcgataaaaactgggctgcgacgtatcaaaaagtgcctgcttttatcgatgaaacgcttgccgctaaaggggcagaaaacatcgctgaccgcggtgaagcagatgcaagcgacgactttgaaggcgcgtatgaagaatggagtgatcatatgtggagtcaggtagcagcctactttaacctcgacattgaaaacagtgaagataataaatctactctttcacttcaatttgtcgacagcgccgcggatatgccgcttgcgaaaatgcacggtgcgttttcaacgaacgtcgtagcaagcaaagaacttcaacagccaggcagtgcacgaagcacgcgacatcttgaaattgaacttccaaaagaagcttcttatcaagaaggagatcatttaggtgttattcctcgcaactatgaaggaatagtaaaccgtgtaacagcaaggttcggcctaagcgcatcacagcaaatccgtctggaagcagaagaagaaaaattagctcatttgccactcgctaaaacagtatccgtagaagagcttctgcaatacgtggagcttcaagatcctgttacgcgcacgcagcttcgcgcaatggctgctaaaacggtctgcccgccgcataaagtagagcttgaagccttgcttgaaaagcaagcctacaaagaacaagtgctggcaaaacgtttaacaatgcttgaactgcttgaaaaatacccggcgtgtgaaatgaaattcagcgaatttatcgcccttctgccaagcatacgcccgcgctattactcgatttcttcatcacctcgtgtcgatgaaaaacaagcaagcatcacggtcagcgttgtctcaggaccggcgtggagcggatatggagaatataaaggaattgcgtcgaactatcttgccgagctgcaagaaggagatacgattacgtgctttatttccacagatcagtcagaatttacgctgccaaaagaccctgaaacgccgcttatcatggtcggaccgggaacaggcgtcgcgccgtttagaggctttgtgcaggcgcgcaaacagctaaaagaacaaggacagtcacttggagaagcacatttatacttcggctgccgttcacctcatgaagactatctgtatcaagaagagcttgaaaacgcccaaagcgaaggcatcattacgcttcataccgctttttctcgcatgccaaatcagccgaaaacatacgttcagcacgtaatggaacaagacggcaagaaattgattgaacttcttgatcaaggagcgcacttctatatttgcggagacggaagccaaatggcacctgccgttgaagcaacgcttatgaaaagctatgctgacgttcaccaagtgagtgaagcagacgctcgcttatggctacagcagctagaagaaaaaggccgatacgcaaaagacgtgtgggctggg

SEQ ID NO: 724 - protein, 1049 aa, synthetic construct
  REGION 1..1049: note = Variant of cytochrome P450
MTIKEMPQPKTFGELKNLPLLNTDKPVQALMRIADELGEIFKFEAPGSVTRFLSSQRLIKEACDESRFDKNLSQGLKFARDFLGDGLFTSWTHEPNWKKAHNILGPSFSQRAMKRYHAMMVDIAVQLVQKWERLNADEHIEVSEDMTRLTLDTIGLCGFNYRFNSFYRDQPHPFIVSVEGALDEVMNKLQRANPDDPAYDENKRQCQEDIKVMNDYVDKIIADRKARGEQSHDLLTQMLNGKDPETGEPLDDGNIRYQIITFLIAGHETTSGLLSFALYFLVKNPHVLQKVAEEAARVLVDPVPSYKQVKQLKYVGMVLNEALRLWPTAPAFSLYAEEDTVLGGEYPLTKGDEVMVLIPQLHRDKTIWGDDVEEFRPERFENPSAIPQHAFKPFGNGQRACIGWQFALHEATLVLGMMLKHFDFEDHTNYELVIKEKLTLKPEGFVVKAKSKGIPLGLIPSPSTEQSAKKVRKKAENAHNTPLLVLYGSNAGTAEGTARDLADIAMSKGFAPQVATLDSHAGNLPREGAVLIVTASYNGHPPDNAKQFVDWLDQASADEVKGVRYSVFGCGDKNWAATYQKVPAFIDETLAAKGAENIADRGEADASDDFEGAYEEWSDHMWSQVAAYFNLDIENSEDNKSTLSLQFVDSAADMPLAKMHGAFSTNVVASKELQQPGSARSTRHLEIELPKEASYQEGDHLGVIPRNYEGIVNRVTARFGLSASQQIRLEAEEEKLAHLPLAKTVSVEELLQYVELQDPVTRTQLRAMAAKTVCPPHKVELEALLEKQAYKEQVLAKRLTMLELLEKYPACEMKFSEFIALLPSIRPRYYSISSSPRVDEKQASITVSVVSGPAWSGYGEYKGIASNYLAELQEGDTITCFISTDQSEFTLPKDPETPLIMVGPGTGVAPFRGFVQARKQLKEQGQSLGEAHLYFGCRSPHEDYLYQEELENAQSEGIITLHTAFSRMPNQPKTYVQHVMEQDGKKLIELLDQGAHFYICGDGSQMAPAVEATLMKSYADVHQVSEADARLWLQQLEEKGRYAKDVWAG

SEQ ID NO: 725 - DNA, 3147 bp, synthetic construct
  misc_feature 1..3147: note = Variant of cytochrome P450
  source 1..3147: mol_type = other DNA
atgacaattaaggaaatgcctcagcctaagacgtttggagaacttaaaaatttaccgttattaaacacagataaaccggttcaagctttgatgcgtattgcggatgaattaggagaaatctttaaattcgaggcgcctggtagcgtaacgcgctttttatcaagtcagcgtctaattaaagaagcatgcgatgaacgtcgctttgataaaaacttaagtcaaggccttaaatttgcacgtgattttcttggagacgggttatttacaagctggacgcatgaaccgaattggaaaaaagcgcataatatcttaggcccaagctttagtcagctggcaatgggccgttatcatgcgatgatggtcgatatcgccgtgcagcttgttcaaaagtgggagcgtctaaatgcagatgagcatattgaagtatcggaagacatgacacgtttaacgctggatacaattggtctttgcggcttcaactatcgctttaacagcttttaccgagatcagccgcatccatttattgtgagtgttgagggtgcactggatgaagtaatgaacaagctgcagcgagcaaatccagacgacccagcttatgatgaaaacaagcgccagtgtcaagaagacatcaaggtgatgaacgactatgtcgataaaattattgcagatcgcaaagcaaggggtgaacaaagccatgatttattaacgcagatgctaaacggaaaagatccagcaacgggtgagccgcttgatgacgggaacattcgttatcaaattctgacattcttaattgcgggacacgaaacaacaagtggtcttttatcatttgcgctgtatttcttagtgaaaaatccacatgtattacaaaaagtagcagaagaagcagcacgagttctagtagatcctgttccaagctacaaacaagtcaaacagcttaaatatgtcggcatggtcttaaacgaagcgctgcgcttatggccaactgctcctgcgttttccctatatgcaaaagaagatacggtacttggaggagaatatcctttaaccaaaggcgacgaagtaatggttctgattcctcagcttcaccgtgataaaacaatttggggagacgatgtggagtcgttccgtccagagcgttttgaaaatccaagtgcgattccgcagcatgcgtttaaaccgtttggaaacggtcagcgtgcgtgtatcggttggcagttcgctcttcatgaagcaacgctggtacttggtatgatgctaaaacactttgactttgaagatcatacaaactacgagctcgttattaaagaaaagttaacgttaaaacctgaaggctttgtggtaaaagcaaaatcgaaaggcattccgcttggcctgattccttcacctagcactgaacagtctgctaaaaaagtacgcaaaaaggcagaaaacgctcataatacgccgctgcttgtgctatacggttcaaatgcgggaacagctgaaggaacggcgcgtgatttagcagatattgcaatgagcaaaggatttgcaccgcaggtcgcaacgcttgattcacacgccggaaatcttccgcgcgaaggagctgtattaattgtaacggcgtcttataacggtcatccgcctgataacgcaaagcagtttgtcgactggttagaccaagcgtctgctgatgaagtaaaaggcgttcgctactccgtatttggatgcggcgataaaaactgggctgcgacgtatcaaaaagtgcctgcttttatcgatgaaacgcttgccgctaaaggggcagaaaacatcgctgacatgggtgagggtgatgcaagcgacgactttgaaggcgcgtatgaagaatggagtgatcatatgtggagtgacgtagcagcctactttaacctcgacattgaaaacagtgaagataataaatctactctttcacttcaatttgtcgacagcgccgcggatatgccgcttgcgaaaatgcacggtgcgttttcaacgaacgtcgtagcaagcaaagaacttcaacagccaggcagtgcacgaagcacgcgacatcttgaaattgaacttccaaaagaagcttcttatcaagaaggagatcatttaggtgttattcctcgcaactatgaaggaatagtaaaccgtgtaacagcaaggttcggcctaagcgcatcacagctgatccgtctggaagcagaagaagaaaaattagctcatttgccactcgctaaaacagtatccgtagaagagcttctgcaatacgtggagcttcaagatcctgttacgcgcacgcagcttcgcgcaatggctgctaaaacggtctgcccgccgcataaagtagagcttgaagccttgcttgaaaagcaagcctacaaagaacaagtgctggcaaaacgtttaacaatgcttgaactgcttgaaaaatacccggcgtgtgaaatgaaattcagcgaatttatcgcccttctgccaagcatacgcccgcgctattactcgatttcttcatcacctcgtgtcgatgaaaaacaagcaagcatcacggtcagcgttgtctcaggaccggcgtggagcggatatggagaatataaaggaattgcgtcgaactatcttgccgagctgcaagaaggagatacgattacgtgctttatttccacagatcagtcagaatttacgctgccaaaagaccctgaaactccgcttatcatggtcggaccgggaacaggcgtcgcgccgtttagaggctttgtgcaggcgcgcaaacagctaaaagaacaaggacagtcacttggagaagcacatttatacttcggctgccgttcacctcatgaagactatctgtatcaagaagagcttgaaaacgcccaaagcgaaggcatcattacgcttcataccgctttttctcgcatgccaaatcagccgaaaacatacgttcagcacgtaatggaacaagacggcaagaaattgattgaacttcttgatcaaggagcgcacttctatatctgcggagacggaagccaaatggcacctgccgttgaagcaacgcttatgaaaagctatgctgacgttcaccaagtgagtgaagcagacgctcgcttatggctgcagcagctagaagaaaaaggccgatacgcaaaagacgtgtgggctggg

SEQ ID NO: 726 - protein, 1049 aa, synthetic construct
  REGION 1..1049: note = Variant of cytochrome P450
MTIKEMPQPKTFGELKNLPLLNTDKPVQALMRIADELGEIFKFEAPGSVTRFLSSQRLIKEACDERRFDKNLSQGLKFARDFLGDGLFTSWTHEPNWKKAHNILGPSFSQLAMGRYHAMMVDIAVQLVQKWERLNADEHIEVSEDMTRLTLDTIGLCGFNYRFNSFYRDQPHPFIVSVEGALDEVMNKLQRANPDDPAYDENKRQCQEDIKVMNDYVDKIIADRKARGEQSHDLLTQMLNGKDPATGEPLDDGNIRYQILTFLIAGHETTSGLLSFALYFLVKNPHVLQKVAEEAARVLVDPVPSYKQVKQLKYVGMVLNEALRLWPTAPAFSLYAKEDTVLGGEYPLTKGDEVMVLIPQLHRDKTIWGDDVESFRPERFENPSAIPQHAFKPFGNGQRACIGWQFALHEATLVLGMMLKHFDFEDHTNYELVIKEKLTLKPEGFVVKAKSKGIPLGLIPSPSTEQSAKKVRKKAENAHNTPLLVLYGSNAGTAEGTARDLADIAMSKGFAPQVATLDSHAGNLPREGAVLIVTASYNGHPPDNAKQFVDWLDQASADEVKGVRYSVFGCGDKNWAATYQKVPAFIDETLAAKGAENIADMGEGDASDDFEGAYEEWSDHMWSDVAAYFNLDIENSEDNKSTLSLQFVDSAADMPLAKMHGAFSTNVVASKELQQPGSARSTRHLEIELPKEASYQEGDHLGVIPRNYEGIVNRVTARFGLSASQLIRLEAEEEKLAHLPLAKTVSVEELLQYVELQDPVTRTQLRAMAAKTVCPPHKVELEALLEKQAYKEQVLAKRLTMLELLEKYPACEMKFSEFIALLPSIRPRYYSISSSPRVDEKQASITVSVVSGPAWSGYGEYKGIASNYLAELQEGDTITCFISTDQSEFTLPKDPETPLIMVGPGTGVAPFRGFVQARKQLKEQGQSLGEAHLYFGCRSPHEDYLYQEELENAQSEGIITLHTAFSRMPNQPKTYVQHVMEQDGKKLIELLDQGAHFYICGDGSQMAPAVEATLMKSYADVHQVSEADARLWLQQLEEKGRYAKDVWAG

SEQ ID NO: 727 - DNA, 3147 bp, synthetic construct
  misc_feature 1..3147: note = Variant of cytochrome P450
  source 1..3147: mol_type = other DNA
atgacaattaaggaaatgcctcagcctaagacgtttggagaacttaaaaatttaccgttattaaacacagataaaccggttcaagctttgatgcgtattgcggatgaattaggagaaatctttaaattcgaggcgcctggtagcgtaacgcgctttttatcaagtcagcgtctaattaaagaagcatgcgatgaacgtcgctttgataaaaacttaagtcaaggccttaaatttgcacgtgattttcttggagacgggttatttacaagctggacgcatgaaccgaattggaaaaaagcgcataatatcttaggcccaagctttagtcagcatgcaatgggccgttatcatgcgatgatggtcgatatcgccgtgcagcttgttcaaaagtgggagcgtctaaatgcagatgagcatattgaagtatcggaagacatgacacgtttaacgctggatacaattggtctttgcggcttcaactatcgctttaacagcttttaccgagatcagccgcatccatttattgtgagtgttgagggtgcactggatgaagtaatgaacaagctgcagcgagcaaatccagacgacccagcttatgatgaaaacaagcgccagtgtcaagaagacatcaaggtgatgaacgactatgtcgataaaattattgcagatcgcaaagcaaggggtgaacaaagccatgatttattaacgcagatgctaaacggaaaagatccagcaacgggtgagccgcttgatgacgggaacattcgttatcaaattctgacattcttaattgcgggacacgaaacaacaagtggtcttttatcatttgcgctgtatttcttagtgaaaaatccacatgtattacaaaaagtagcagaagaagcagcacgagttctagtagatcctgttccaagctacaaacaagtcaaacagcttaaatatgtcggcatggtcttaaacgaagcgctgcgcttatggccaactgctcctgcgttttccctatatgcaaaagaagatacggtacttggaggagaatatcctttaaccaaaggcgacgaagtaatggttctgattcctcagcttcaccgtgataaaacaatttggggagacgatgtggaggaattccgtccagagcgttttgaaaatccaagtgcgattccgcagcatgcgtttaaaccgtttggaaacggtcagcgtgcgtgtatcggttggcagttcgctcttcatgaagcaacgctggtacttggtatgatgctaaaacactttgactttgaagatcatacaaactacgagctcgttattaaagaaaagttaacgttaaaacctgaaggctttgtggtaaaagcaaaatcgaaaggcattccgcttggcctgattccttcacctagcactgaacagtctgctaaaaaagtacgcaaaaaggcagaaaacgctcataatacgccgctgcttgtgctatacggttcaaatgcgggaacagctgaaggaacggcgcgtgatttagcagatattgcaatgagcaaaggatttgcaccgcaggtcgcaacgcttgattcacacgccggaaatcttccgcgcgaaggagctgtattaattgtaacggcgtcttataacggtcatccgcctgataacgcaaagcagtttgtcgactggttagaccaagcgtctgctgatgaagtaaaaggcgttcgctactccgtatttggatgcggcgataaaaactgggctgcgacgtatcaaaaagtgcctgcttttatcgatgaaacgcttgccgctaaaggggcagaaaacatcgctgacatgggtgagggtgatgcaagcgacgactttgaaggcgcgtatgaagaatggagtgatcatatgtggaccgacgtagcagcctactttaacctcgacattgaaaacagtgaagataataaatctactctttcacttcaatttgtcgacagcgccgcggatatgccgcttgcgaaaatgcacggtgcgttttcaacgaacgtcgtagcaagcaaagaacttcaacagccaggcagtgcacgaagcacgcgacatcttgaaattgaacttccaaaagaagcttcttatcaagaaggagatcatttaggtgttattcctcgcaactatgaaggaatagtaaaccgtgtaacagcaaggttcggcctaagcgcatcacagctgatccgtctggaagcagaagaagaaaaattagctcatttgccactcgctaaaacagtatccgtagaagagcttctgcaatacgtggagcttcaagatcctgttacgcgcacgcagcttcgcgcaatggctgctaaaacggtctgcccgccgcataaagtagagcttgaagccttgcttgaaaagcaagcctacaaagaacaagtgctggcaaaacgtttaacaatgcttgaactgcttgaaaaatacccggcgtgtgaaatgaaattcagcgaatttatcgcccttctgccaagcatacgcccgcgctattactcgatttcttcatcacctcgtgtcgatgaaaaacaagcaagcatcacggtcagcgttgtctcaggagacgcgtggagcggatatggagaatataaaggaattgcgtcgaactatcttgccgagctgcaagaaggagatacgattacgtgctttatttccacagatcagtcagaatttacgctgccaaaagaccctgaaactccgcttatcatggtcggaccgggaacaggcgtcgcgccgtttagaggctttgtgcaggcgcgcaaacagctaaaagaacaaggacagtcacttggagaagcacatttatacttcggctgccgttcacctcatgaagactatctgtatcaagaagagcttgaaaacgcccaaagcgaaggcatcattacgcttcataccgctttttctcgcatgccaaatcagccgaaaacatacgttcagcacgtaatggaacaagacggcaagaaattgattgaacttcttgatcaaggagcgcacttctatatctgcggagacggaagccaaatggcacctgccgttgaagcaacgcttatgaaaagctatgctgacgttcaccaagtgagtgaggcagacgctcgcttatggctgcagcagctagaagaaaaaggccgatacgcaaaagacgtgtgggctggg

SEQ ID NO: 728 - protein, 1049 aa, synthetic construct
  REGION 1..1049: note = Variant of cytochrome P450
MTIKEMPQPKTFGELKNLPLLNTDKPVQALMRIADELGEIFKFEAPGSVTRFLSSQRLIKEACDERRFDKNLSQGLKFARDFLGDGLFTSWTHEPNWKKAHNILGPSFSQHAMGRYHAMMVDIAVQLVQKWERLNADEHIEVSEDMTRLTLDTIGLCGFNYRFNSFYRDQPHPFIVSVEGALDEVMNKLQRANPDDPAYDENKRQCQEDIKVMNDYVDKIIADRKARGEQSHDLLTQMLNGKDPATGEPLDDGNIRYQILTFLIAGHETTSGLLSFALYFLVKNPHVLQKVAEEAARVLVDPVPSYKQVKQLKYVGMVLNEALRLWPTAPAFSLYAKEDTVLGGEYPLTKGDEVMVLIPQLHRDKTIWGDDVEEFRPERFENPSAIPQHAFKPFGNGQRACIGWQFALHEATLVLGMMLKHFDFEDHTNYELVIKEKLTLKPEGFVVKAKSKGIPLGLIPSPSTEQSAKKVRKKAENAHNTPLLVLYGSNAGTAEGTARDLADIAMSKGFAPQVATLDSHAGNLPREGAVLIVTASYNGHPPDNAKQFVDWLDQASADEVKGVRYSVFGCGDKNWAATYQKVPAFIDETLAAKGAENIADMGEGDASDDFEGAYEEWSDHMWTDVAAYFNLDIENSEDNKSTLSLQFVDSAADMPLAKMHGAFSTNVVASKELQQPGSARSTRHLEIELPKEASYQEGDHLGVIPRNYEGIVNRVTARFGLSASQLIRLEAEEEKLAHLPLAKTVSVEELLQYVELQDPVTRTQLRAMAAKTVCPPHKVELEALLEKQAYKEQVLAKRLTMLELLEKYPACEMKFSEFIALLPSIRPRYYSISSSPRVDEKQASITVSVVSGDAWSGYGEYKGIASNYLAELQEGDTITCFISTDQSEFTLPKDPETPLIMVGPGTGVAPFRGFVQARKQLKEQGQSLGEAHLYFGCRSPHEDYLYQEELENAQSEGIITLHTAFSRMPNQPKTYVQHVMEQDGKKLIELLDQGAHFYICGDGSQMAPAVEATLMKSYADVHQVSEADARLWLQQLEEKGRYAKDVWAG

SEQ ID NO: 729 - DNA, 3147 bp, synthetic construct
  misc_feature 1..3147: note = Variant of cytochrome P450
  source 1..3147: mol_type = other DNA
atgacaattaaggaaatgcctcagcctaagacgtttggagaacttaaaaatttaccgttattaaacacagataaaccggttcaagctttgatgcgtattgcggatgaattaggagaaatctttaaattcgaggcgcctggtagcgtaacgcgctttttatcaagtcagcgtctaattaaagaagcatgcgatgaacgtcgctttgataaaaacttaagtcaaggccttaaatttgcacgtgattttcttggagacgggttatttacaagctggacgcatgaaccgaattggaaaaaagcgcataatatcttaggcccaagctttagtcagctggcaatgggccgttatcatgcgatgatggtcgatatcgccgtgcagcttgttcaaaagtgggagcgtctaaatgcagatgagcatattgaagtatcggaagacatgacacgtttaacgctggatacaattggtctttgcggcttcaactatcgctttaacagcttttaccgagatcagccgcatccatttattgtgagtgttgagggtgcactggatgaagtaatgaacaagctgcagcgagcaaatccagacgacccagcttatgatgaaaacaagcgccagtgtcaagaagacatcaaggtgatgaacgactatgtcgataaaattattgcagatcgcaaagcaaggggtgaacaaagccatgatttattaacgcagatgctaaacggaaaagatccagcaacgggtgagccgcttgatgacgggaacattcgttatcaaattctgacattcttaattgcgggacacgaaacaacaagtggtcttttatcatttgcgctgtatttcttagtgaaaaatccacatgtattacaaaaagtagcagaagaagcagcacgagttctagtagatcctgttccaagctacaaacaagtcaaacagcttaaatatgtcggcatggtcttaaacgaagcgctgcgcttatggccaactgctcctgcgttttccctatatgcaaaagaagatacggtacttggaggagaatatcctttaaccaaaggcgacgaagtaatggttctgattcctcagcttcaccgtgataaaacaatttggggagacgatgtggagtcgttccgtccagagcgttttgaaaatccaagtgcgattccgcagcatgcgtttaaaccgtttggaaacggtcagcgtgcgtgtatcggttggcagttcgctcttcatgaagcaaccctggtacttggtatgatgctaaaacactttgactttgaagatcatacaaactacgagctcgttattaaagaaaagttaacgttaaaacctgaaggctttgtggtaaaagcaaaatcgaaaggcattccgcttggcctgattccttcacctagcactgaacagtctgctaaaaaagtacgcaaaaaggcagaaaacgctcataatacgccgctgcttgtgctatacggttcaaatgcgggaacagctgaaggaacggcgcgtgatttagcagatattgcaatgagcaaaggatttgcaccgcaggtcgcaacgcttgattcacacgccggaaatcttccgcgcgaaggagctgtattaattgtaacggcgtcttataacggtcatccgcctgataacgcaaagcagtttgtcgactggttagaccaagcgtctgctgatgaagtaaaaggcgttcgctactccgtatttggatgcggcgataaaaactgggctgcgacgtatcaaaaagtgcctgcttttatcgatgaaacgcttgccgctaaaggggcagaaaacatcgctgaccgcggtgaagcagatgcaagcgacgactttgaaggcgcgtatgaagaatggagtgatcatatgtggagtgacgtagcagcctactttaacctcgacattgaaaacagtgaagataataaatctactctttcacttcaatttgtcgacagcgccgcggatatgccgcttgcgaaaatgcacggtgcgttttcaacgaacgtcgtagcaagcaaagaacttcaacagccaggcagtgcacgaagcacgcgacatcttgaaattgaacttccaaaagaagcttcttatcaagaaggagatcatttaggtgttattcctcgcaactatgaaggaatagtaaaccgtgtaacagcaaggttcggcctaagcgcatcacagctgatccgtctggaagcagaagaagaaaaattagctcatttgccactcgctaaaacagtatccgtagaagagcttctgcaatacgtggagcttcaagatcctgttacgcgcacgcagcttcgcgcaatggctgctaaaacggtctgcccgccgcataaagtagagcttgaagccttgcttgaaaagcaagcctacaaagaacaagtgctggcaaaacgtttaacaatgcttgaactgcttgaaaaatacccggcgtgtgaaatgaaattcagcgaatttatcgcccttctgccaagcatacgcccgcgctattactcgatttcttcatcacctcgtgtcgatgaaaaacaagcaagcatcacggtcagcgttgtctcaggaccagcgtggagcggatatggagaatataaaggaattgcgtcgaactatcttgccgagctgcaagaaggagatacgattacgtgctttatttccacagatcagtcagaatttacgctgccaaaagaccctgaaacgccgcttatcatggtcggaccgggaacaggcgtcgcgccgtttagaggctttgtgcaggcgcgcaaacagctaaaagaacaaggacagtcacttggagaagcacatttatacttcggctgccgttcacctcatgaagactatctgtatcaagaagagcttgaaaacgcccaaagcgaaggcatcattacgcttcataccgctttttctcgcatgccaaatcagccgaaaacatacgttcagcacgtaatggaacaagacggcaagaaattgattgaacttcttgatcaaggagcgcacttctattgttgcggagacggaagccaaatggcacctgccgttgaagcaacgcttatgaaaagctatgctgacgttcaccaagtgagtgaggcagacgctcgcttatggctgcagcagctagaagaaaaaggccgatacgcaaaagacgtgtgggctggg

SEQ ID NO: 730 - protein, 1049 aa, synthetic construct
  REGION 1..1049: note = Variant of cytochrome P450
MTIKEMPQPKTFGELKNLPLLNTDKPVQALMRIADELGEIFKFEAPGSVTRFLSSQRLIKEACDERRFDKNLSQGLKFARDFLGDGLFTSWTHEPNWKKAHNILGPSFSQLAMGRYHAMMVDIAVQLVQKWERLNADEHIEVSEDMTRLTLDTIGLCGFNYRFNSFYRDQPHPFIVSVEGALDEVMNKLQRANPDDPAYDENKRQCQEDIKVMNDYVDKIIADRKARGEQSHDLLTQMLNGKDPATGEPLDDGNIRYQILTFLIAGHETTSGLLSFALYFLVKNPHVLQKVAEEAARVLVDPVPSYKQVKQLKYVGMVLNEALRLWPTAPAFSLYAKEDTVLGGEYPLTKGDEVMVLIPQLHRDKTIWGDDVESFRPERFENPSAIPQHAFKPFGNGQRACIGWQFALHEATLVLGMMLKHFDFEDHTNYELVIKEKLTLKPEGFVVKAKSKGIPLGLIPSPSTEQSAKKVRKKAENAHNTPLLVLYGSNAGTAEGTARDLADIAMSKGFAPQVATLDSHAGNLPREGAVLIVTASYNGHPPDNAKQFVDWLDQASADEVKGVRYSVFGCGDKNWAATYQKVPAFIDETLAAKGAENIADRGEADASDDFEGAYEEWSDHMWSDVAAYFNLDIENSEDNKSTLSLQFVDSAADMPLAKMHGAFSTNVVASKELQQPGSARSTRHLEIELPKEASYQEGDHLGVIPRNYEGIVNRVTARFGLSASQLIRLEAEEEKLAHLPLAKTVSVEELLQYVELQDPVTRTQLRAMAAKTVCPPHKVELEALLEKQAYKEQVLAKRLTMLELLEKYPACEMKFSEFIALLPSIRPRYYSISSSPRVDEKQASITVSVVSGPAWSGYGEYKGIASNYLAELQEGDTITCFISTDQSEFTLPKDPETPLIMVGPGTGVAPFRGFVQARKQLKEQGQSLGEAHLYFGCRSPHEDYLYQEELENAQSEGIITLHTAFSRMPNQPKTYVQHVMEQDGKKLIELLDQGAHFYCCGDGSQMAPAVEATLMKSYADVHQVSEADARLWLQQLEEKGRYAKDVWAG

SEQ ID NO: 731 - DNA, 3147 bp, synthetic construct
  misc_feature 1..3147: note = Variant of cytochrome P450
  source 1..3147: mol_type = other DNA
atgacaattaaggaaatgcctcagcctaagacgtttggagaacttaaaaatttaccgttattaaacacagataaaccggttcaagctttgatgcgtattgcggatgaattaggagaaatctttaaattcgaggcgcctggtagcgtaacgcgctttttatcaagtcagcgtctaattaaagaagcatgcgatgaaagccgctttgataaaaacttaagtcaaggccttaaatttgcacgtgattttcttggagacgggttatttacaagctggacgcatgaaccgaattggaaaaaagcgcataatatcttaggcccaagctttagtcagcatgcaatgggccgttatcatgcgatgatggtcgatatcgccgtgcagcttgttcaaaagtgggagcgtctaaatgcagatgagcatattgaagtatcggaagacatgacacgtttaacgctggatacaattggtctttgcggcttcaactatcgctttaacagcttttaccgagatcagccgcatccatttattgtgagtgttgagggtgcactggatgaagtaatgaacaagctgcagcgagcaaatccagacgacccagcttatgatgaaaacaagcgccagtgtcaagaagacatcaaggtgatgaacgactatgtcgataaaattattgcagatcgcaaagcaaggggtgaacaaagccatgatttattaacgcagatgctaaacggaaaagatccagcaacgggtgagccgcttgatgacgggaacattcgttatcaaattctgacattcttaattgcgggacacgaaacaacaagtggtcttttatcatttgcgctgtatttcttagtgaaaaatccacatgtattacaaaaagtagcagaagaagcagcacgagttctagtagatcctgttccaagctacaaacaagtcaaacagcttaaatatgtcggcatggtcttaaacgaagcgctgcgcttatggccaactgctcctgcgttttccctatatgcaaaagaagatacggtacttggaggagaatatcctttaaccaaaggcgacgaagtaatggttctgattcctcagcttcaccgtgataaaacaatttggggagacgatgtggagtcgttccgtccagagcgttttgaaaatccaagtgcgattccgcagcatgcgtttaaaccgtttggaaacggtcagcgtgcgtgtatcggttggcagttcgctcttcatgaagcaacgctggtacttggtatgatgctaaaacactttgactttgaagatcatacaaactacgagctcgttattaaagaaaagttaacgttaaaacctgaaggctttgtggtaaaagcaaaatcgaaaggcattccgcttggcctgattccttcacctagcactgaacagtctgctaaaaaagtacgcaaaaaggcagaaaacgctcataatacgccgctgcttgtgctatacggttcaaatgcgggaacagctgaaggaacggcgcgtgatttagcagatattgcaatgagcaaaggatttgcaccgcaggtcgcaacgcttgattcacacgccggaaatcttccgcgcgaaggagctgtattaattgtaacggcgtcttataacggtcatccgcctgataacgcaaagcagtttgtcgactggttagaccaagcgtctgctgatgaagtaaaaggcgttcgctactccgtatttggatgcggcgataaaaactgggctgcgacgtatcaaaaagtgcctgcttttatcgatgaaacgcttgccgctaaaggggcagaaaacatcgctgaccgcggtttcggtgatgcaagcgacgactttgaaggcgcgtatgaagaatggagtgatcatatgtggcaagacgtagcagcctactttaacctcgacattgaaaacagtgaagataataaatctactctttcacttcaatttgtcgacagcgccgcggatatgccgcttgcgaaaatgcacggtgcgttttcaacgaacgtcgtagcaagcaaagaacttcaacagccaggcagtgcacgaagcacgcgacatcttgaaattgaacttccaaaagaagcttcttatcaagaaggagatcatttaggtgttattcctcgcaactatgaaggaatagtaaaccgtgtaacagcaaggttcggcctaagcgcatcacagctgatccgtctggaagcagaagaagaaaaattagctcatttgccactcgctaaaacagtatccgtagaagagcttctgcaatacgtggagcttcaagatcctgttacgcgcacgcagcttcgcgcaatggctgctaaaacggtctgcccgccgcataaagtagagcttgaagccttgcttgaaaagcaagcctacaaagaacaagtgctggcaaaacgtttaacaatgcttgaactgcttgaaaaatacccggcgtgtgaaatgaaattcagcgaatttatcgcccttctgccaagcatacgcccgcgctattactcgatttcttcatcacctcgtgtcgatgaaaaacaagcaagcatcacggtcagcgttgtctcaggaccagcgtggagcggatatggagaatataaaggaattgcgtcgaactatcttgccgagctgcaagaaggagatacgattacgtgctttatttccacagatcagtcagaatttacgctgccaaaagaccctgaaacgccgcttatcatggtcggaccgggaacaggcgtcgcgccgtttagaggctttgtgcaggcgcgcaaacagctaaaagaacaaggacagtcacttggagaagcacatttatacttcggctgccgttcacctcatgaagactatctgtatcaagaagagcttgaaaacgcccaaagcgaaggcatcattacgcttcataccgctttttctcgcatgccaaatcagccgaaaacatacgttcagcacgtaatggaacaagacggcaagaaattgattgaacttcttgatcaaggagcgcacttctatatttgcggagacggaagccaaatggcacctgccgttgaagcaacgcttatgaaaagctatgctgacgttcaccaagtgagtgaagcagacgctcgcttatggctgcagcagctagaagaaaaaggccgatacgcaaaagacgtgtgggctggg

SEQ ID NO: 732 - protein, 1049 aa, synthetic construct
  REGION 1..1049: note = Variant of cytochrome P450
MTIKEMPQPKTFGELKNLPLLNTDKPVQALMRIADELGEIFKFEAPGSVTRFLSSQRLIKEACDESRFDKNLSQGLKFARDFLGDGLFTSWTHEPNWKKAHNILGPSFSQHAMGRYHAMMVDIAVQLVQKWERLNADEHIEVSEDMTRLTLDTIGLCGFNYRFNSFYRDQPHPFIVSVEGALDEVMNKLQRANPDDPAYDENKRQCQEDIKVMNDYVDKIIADRKARGEQSHDLLTQMLNGKDPATGEPLDDGNIRYQILTFLIAGHETTSGLLSFALYFLVKNPHVLQKVAEEAARVLVDPVPSYKQVKQLKYVGMVLNEALRLWPTAPAFSLYAKEDTVLGGEYPLTKGDEVMVLIPQLHRDKTIWGDDVESFRPERFENPSAIPQHAFKPFGNGQRACIGWQFALHEATLVLGMMLKHFDFEDHTNYELVIKEKLTLKPEGFVVKAKSKGIPLGLIPSPSTEQSAKKVRKKAENAHNTPLLVLYGSNAGTAEGTARDLADIAMSKGFAPQVATLDSHAGNLPREGAVLIVTASYNGHPPDNAKQFVDWLDQASADEVKGVRYSVFGCGDKNWAATYQKVPAFIDETLAAKGAENIADRGFGDASDDFEGAYEEWSDHMWQDVAAYFNLDIENSEDNKSTLSLQFVDSAADMPLAKMHGAFSTNVVASKELQQPGSARSTRHLEIELPKEASYQEGDHLGVIPRNYEGIVNRVTARFGLSASQLIRLEAEEEKLAHLPLAKTVSVEELLQYVELQDPVTRTQLRAMAAKTVCPPHKVELEALLEKQAYKEQVLAKRLTMLELLEKYPACEMKFSEFIALLPSIRPRYYSISSSPRVDEKQASITVSVVSGPAWSGYGEYKGIASNYLAELQEGDTITCFISTDQSEFTLPKDPETPLIMVGPGTGVAPFRGFVQARKQLKEQGQSLGEAHLYFGCRSPHEDYLYQEELENAQSEGIITLHTAFSRMPNQPKTYVQHVMEQDGKKLIELLDQGAHFYICGDGSQMAPAVEATLMKSYADVHQVSEADARLWLQQLEEKGRYAKDVWAG

SEQ ID NO: 733 - DNA, 3147 bp, synthetic construct
  misc_feature 1..3147: note = Variant of cytochrome P450
  source 1..3147: mol_type = other DNA
atgacaattaaggaaatgcctcagcctaagacgtttggagaacttaaaaatttaccgttattaaacacagataaaccggttcaagctttgatgcgtattgcggatgaattaggagaaatctttaaattcgaggcgcctggtagcgtaacgcgctttttatcaagtcagcgtctaattaaagaagcatgcgatgaaagtcgctttgataaaaacttaagtcaaggccttaaatttgcacgtgattttcttggagacgggttatttacaagctggacgcatgaaccgaattggaaaaaagcgcataatatcttaggcccaagctttagtcagctggcaatgggccgttatcatgcgatgatggtcgatatcgccgtgcagcttgttcaaaagtgggagcgtctaaatgcagatgagcatattgaagtatcggaagacatgacacgtttaacgctggatacaattggtctttgcggcttcaactatcgctttaacagcttttaccgagatcagccgcatccatttattgtgagtgttgagggtgcactggatgaagtaatgaacaagctgcagcgagcaaatccagacgacccagcttatgatgaaaacaagcgccagtgtcaagaagacatcaaggtgatgaacgactatgtcgataaaattattgcagatcgcaaagcaaggggtgaacaaagccatgatttattaacgcagatgctaaacggaaaagatccagcaacgggtgagccgcttgatgacgggaacattcgttatcaaattctgacattcttaattgcgggacacgaaacaacaagtggtcttttatcatttgcgctgtatttcttagtgaaaaatccacatgtattacaaaaagtagcagaagaagcagcacgagttctagtagatcctgttccaagctacaaacaagtcaaacagcttaaatatgtcggcatggtcttaaacgaagcgctgcgcttatggccaactgctcctgcgttttccctatatgcaaaagaagatacggtacttggaggagaatatcctttaaccaaaggcgacgaagtaatggttctgattcctcagcttcaccgtgataaaacaatttggggagacgatgtggagtcgttccgtccagagcgttttgaaaatccaagtgcgattccgcagcatgcgtttaaaccgtttggaaacggtcagcgtgcgtgtatcggttggcagttcgctcttcatgaagcaacgctggtacttggtatgatgctaaaacactttgactttgaagatcatacaaactacgagctcgttattaaagaaaagttaacgttaaaacctgaaggctttgtggtaaaagcaaaatcgaaaggcattccgcttggcctgattccttcacctagcactgaacagtctgctaaaaaagtacgcaaaaaggcagaaaacgctcataatacgccgctgcttgtgctatacggttcaaatgcgggaacagctgaaggaacggcgcgtgatttagcagatattgcaatgagcaaaggatttgcaccgcaggtcgcaacgcttgattcacacgccggaaatcttccgcgcgaaggagctgtattaattgtaacggcgtcttataacggtcatccgcctgataacgcaaagcagtttgtcgactggttagaccaagcgtctgctgatgaagtaaaaggcgttcgctactccgtatttggatgcggcgataaaaactgggctgcgacgtatcaaaaagtgcctgcttttatcgatgaaacgcttgccgctaaaggggcagaaaacatcgctgaccgcggtttcggtgatgcaagcgacgactttgaaggcgcgtatgaagaatggagtgatcatatgtggagtgacgtagcagcctactttaacctcgacattgaaaacagtgaagataataaatctactcttacccttcaatttgtcgacagcgccgcggatatgccgcttgcgaaaatgcacggtgcgttttcaacgaacgtcgtagcaagcaaagaacttcaacagccaggcagtgcacgaagcacgcgacatcttgaaattgaacttccaaaagaagcttcttatcaagaaggagatcatttaggtgttattcctcgcaactatgaaggaatagtaaaccgtgtaacagcaaggttcggcctaagcgcatcacagcagatccgtctggaagcagaagaagaaaaattagctcatttgccactcgctaaaacagtatccgtagaagagcttctgcaatacgtggagcttcaagatcctgttacgcgcacgcagcttcgcgcaatggctgctaaaacggtctgcccgccgcataaagtagagcttgaagccttgcttgaaaagcaagcctacaaagaacaagtgctggcaaaacgtttaacaatgcttgaactgcttgaaaaatacccggcgtgtgaaatgaaattcagcgaatttatcgcccttctgccaagcatacgcccgcgctattactcgatttcttcatcacctcgtgtcgatgaaaaacaagcaagcatcacggtcagcgttgtctcaggaccagcgtggagcggatatggagaatataaaggaattgcgtcgaactatcttgccgagctgcaagaaggagatacgattacgtgctttatttccacagatcagtcagaatttacgctgccaaaagaccctgaaacgccgcttatcatggtcggaccgggaacaggcgtcgcgccgtttagaggctttgtgcaggcgcgcaaacagctaaaagaacaaggacagtcacttggagaagcacatttatacttcggctgccgttcacctcatgaagactatctgtatcaagaagagcttgaaaacgcccaaagcgaaggcatcattacgcttcataccgctttttctcgcatgccaaatcagccgaaaacatacgttcagcacgtaatggaacaagacggcaagaaattgattgaacttcttgatcaaggagcgcacttctatatttgcggagacggaagccaaatggcacctgccgttgaagcaacgcttatgaaaagctatgctgacgttcaccaagtgagtgaagcagacgctcgcttatggctgcagcagctagaagaaaaaggccgatacgcaaaagacgtgtgggctggg

SEQ ID NO: 734 - protein, 1049 aa, synthetic construct
  REGION 1..1049: note = Variant of cytochrome P450
MTIKEMPQPKTFGELKNLPLLNTDKPVQALMRIADELGEIFKFEAPGSVTRFLSSQRLIKEACDESRFDKNLSQGLKFARDFLGDGLFTSWTHEPNWKKAHNILGPSFSQLAMGRYHAMMVDIAVQLVQKWERLNADEHIEVSEDMTRLTLDTIGLCGFNYRFNSFYRDQPHPFIVSVEGALDEVMNKLQRANPDDPAYDENKRQCQEDIKVMNDYVDKIIADRKARGEQSHDLLTQMLNGKDPATGEPLDDGNIRYQILTFLIAGHETTSGLLSFALYFLVKNPHVLQKVAEEAARVLVDPVPSYKQVKQLKYVGMVLNEALRLWPTAPAFSLYAKEDTVLGGEYPLTKGDEVMVLIPQLHRDKTIWGDDVESFRPERFENPSAIPQHAFKPFGNGQRACIGWQFALHEATLVLGMMLKHFDFEDHTNYELVIKEKLTLKPEGFVVKAKSKGIPLGLIPSPSTEQSAKKVRKKAENAHNTPLLVLYGSNAGTAEGTARDLADIAMSKGFAPQVATLDSHAGNLPREGAVLIVTASYNGHPPDNAKQFVDWLDQASADEVKGVRYSVFGCGDKNWAATYQKVPAFIDETLAAKGAENIADRGFGDASDDFEGAYEEWSDHMWSDVAAYFNLDIENSEDNKSTLTLQFVDSAADMPLAKMHGAFSTNVVASKELQQPGSARSTRHLEIELPKEASYQEGDHLGVIPRNYEGIVNRVTARFGLSASQQIRLEAEEEKLAHLPLAKTVSVEELLQYVELQDPVTRTQLRAMAAKTVCPPHKVELEALLEKQAYKEQVLAKRLTMLELLEKYPACEMKFSEFIALLPSIRPRYYSISSSPRVDEKQASITVSVVSGPAWSGYGEYKGIASNYLAELQEGDTITCFISTDQSEFTLPKDPETPLIMVGPGTGVAPFRGFVQARKQLKEQGQSLGEAHLYFGCRSPHEDYLYQEELENAQSEGIITLHTAFSRMPNQPKTYVQHVMEQDGKKLIELLDQGAHFYICGDGSQMAPAVEATLMKSYADVHQVSEADARLWLQQLEEKGRYAKDVWAG

SEQ ID NO: 735 - DNA, 3147 bp, synthetic construct
  misc_feature 1..3147: note = Variant of cytochrome P450
  source 1..3147: mol_type = other DNA
atgacaattaaggaaatgcctcagcctaagacgtttggagaacttaaaaatttaccgttattaaacacagataaaccggttcaagctttgatgcgtattgcggatgaattaggagaaatctttaaattcgaggcgcctggtagcgtaacgcgctttttatcaagtcagcgtctaattaaagaagcatgcgatgaaagtcgctttgataaaaacttaagtcaaggccttaaatttgcacgtgattttcttggagacgggttatttacaagctggacgcatgaaccgaattggaaaaaagcgcataatatcttaggcccaagctttagtcagctggcaatgggccgttatcatgcgatgatggtcgatatcgccgtgcagcttgttcaaaagtgggagcgtctaaatgcagatgagcatattgaagtatcggaagacatgacacgtttaacgctggatacaattggtctttgcggcttcaactatcgctttaacagcttttaccgagatcagccgcatccatttattgtgagtgttgagggtgcactggatgaagtaatgaacaagctgcagcgagcaaatccagacgacccagcttatgatgaaaacaagcgccagtgtcaagaagacatcaaggtgatgaacgactatgtcgataaaattattgcagatcgcaaagcaaggggtgaacaaagccatgatttattaacgcagatgctaaacggaaaagatccagcaacgggtgagccgcttgatgacgggaacattcgttatcaaattctgacattcttaattgcgggacacgaaacaacaagtggtcttttatcatttgcgctgtatttcttagtgaaaaatccacatgtattacaaaaagtagcagaagaagcagcacgagttctagtagatcctgttccaagctacaaacaagtcaaacagcttaaatatgtcggcatggtcttaaacgaagcgctgcgcttatggccaactgctcctgcgttttccctatatgcaaaagaagatacggtacttggaggagaatatcctttaaccaaaggcgacgaagtaatggttctgattcctcagcttcaccgtgataaaacaatttggggagacgatgtggaggaattccgtccagagcgttttgaaaatccaagtgcgattccgcagcatgcgtttaaaccgtttggaaacggtcagcgtgcgtgtatcggttggcagttcgctcttcatgaagcaacgctggtacttggtatgatgctaaaacactttgactttgaagatcatacaaactacgagctcgttattaaagaaaagttaacgttaaaacctgaaggctttgtggtaaaagcaaaatcgaaaggcattccgcttggcctgattccttcacctagcactgaacagtctgctaaaaaagtacgcaaaaaggcagaaaacgctcataatacgccgctgcttgtgctatacggttcaaatgcgggaacagctgaaggaacggcgcgtgatttagcagatattgcaatgagcaaaggatttgcaccgcaggtcgcaacgcttgattcacacgccggaaatcttccgcgcgaaggagctgtattaattgtaacggcgtcttataacggtcatccgcctgataacgcaaagcagtttgtcgactggttagaccaagcgtctgctgatgaagtaaaaggcgttcgctactccgtatttggatgcggcgataaaaactgggctgcgacgtatcaaaaagtgcctgcttttatcgatgaaacgcttgccgctaaaggggcagaaaacatcgctgaccgcggtttcggtgatgcaagcgacgactttgaaggcgcgtatgaagaatggagtgatcatatgtggagtgacgtagcagcctactttaacctcgacattgaaaacagtgaagataataaatctactctttcacttcaatttgtcgacagcgccgcggatatgccgcttgcgaaaatgcacggtgcgttttcaacgaacgtcgtagcaagcaaagaacttcaacagccaggcagtgcacgaagcacgcgacatcttgaaattgaacttccaaaagaagcttcttatcaagaaggagatcatttaggtgttattcctcgcaactatgaaggaatagtaaaccgtgtaacagcaaggttcggcctaagcgcatcacagctgatccgtctggaagcagaagaagaaaaattagctcatttgccactcgctaaaacagtatccgtagaagagcttctgcaatacgtggagcttcaagatcctgttacgcgcacgcagcttcgcgcaatggctgctaaaacggtctgcccgccgcataaagtagagcttgaagccttgcttgaaaagcaagcctacaaagaacaagtgctggcaaaacgtttaacaatgcttgaactgcttgaaaaatacccggcgtgtgaaatgaaattcagcgaatttatcgcccttctgccaagcatacgcccgcgctattactcgatttcttcatcacctcgtgtcgatgaaaaacaagcaagcatcacggtcagcgttgtctcaggaccagcgtggagcggatatggagaatataaaggaattgcgtcgaactatcttgccgagctgcaagaaggagatacgattacgtgctttatttccacagatcagtcagaatttacgctgccaaaagaccctctggtgccgcttatcatggtcggaccgggaacaggcgtcgcgccgtttagaggctttgtgcaggcgcgcaaacagctaaaagaacaaggacagtcacttggagaagcacatttatacttcggctgccgttcacctcatgaagactatctgtatcaagaagagcttgaaaacgcccaaagcgaaggcatcattacgcttcataccgctttttctcgcatgccaaatcagccgaaaacatacgttcagcacgtaatggaacaagacggcaagaaattgattgaacttcttgatcaaggagcgcacttctatatctgcggagacggaagccaaatggcacctgccgttgaagcaacgcttatgaaaagctatgctgacgttcaccaagtgagtgaggcagacgctcgcttatggctgcagcagctagaagaaaaaggccgatacgcaaaagacgtgtgggctggg

SEQ ID NO: 736 - protein, 1049 aa, synthetic construct
  REGION 1..1049: note = Variant of cytochrome P450
MTIKEMPQPKTFGELKNLPLLNTDKPVQALMRIADELGEIFKFEAPGSVTRFLSSQRLIKEACDESRFDKNLSQGLKFARDFLGDGLFTSWTHEPNWKKAHNILGPSFSQLAMGRYHAMMVDIAVQLVQKWERLNADEHIEVSEDMTRLTLDTIGLCGFNYRFNSFYRDQPHPFIVSVEGALDEVMNKLQRANPDDPAYDENKRQCQEDIKVMNDYVDKIIADRKARGEQSHDLLTQMLNGKDPATGEPLDDGNIRYQILTFLIAGHETTSGLLSFALYFLVKNPHVLQKVAEEAARVLVDPVPSYKQVKQLKYVGMVLNEALRLWPTAPAFSLYAKEDTVLGGEYPLTKGDEVMVLIPQLHRDKTIWGDDVEEFRPERFENPSAIPQHAFKPFGNGQRACIGWQFALHEATLVLGMMLKHFDFEDHTNYELVIKEKLTLKPEGFVVKAKSKGIPLGLIPSPSTEQSAKKVRKKAENAHNTPLLVLYGSNAGTAEGTARDLADIAMSKGFAPQVATLDSHAGNLPREGAVLIVTASYNGHPPDNAKQFVDWLDQASADEVKGVRYSVFGCGDKNWAATYQKVPAFIDETLAAKGAENIADRGFGDASDDFEGAYEEWSDHMWSDVAAYFNLDIENSEDNKSTLSLQFVDSAADMPLAKMHGAFSTNVVASKELQQPGSARSTRHLEIELPKEASYQEGDHLGVIPRNYEGIVNRVTARFGLSASQLIRLEAEEEKLAHLPLAKTVSVEELLQYVELQDPVTRTQLRAMAAKTVCPPHKVELEALLEKQAYKEQVLAKRLTMLELLEKYPACEMKFSEFIALLPSIRPRYYSISSSPRVDEKQASITVSVVSGPAWSGYGEYKGIASNYLAELQEGDTITCFISTDQSEFTLPKDPLVPLIMVGPGTGVAPFRGFVQARKQLKEQGQSLGEAHLYFGCRSPHEDYLYQEELENAQSEGIITLHTAFSRMPNQPKTYVQHVMEQDGKKLIELLDQGAHFYICGDGSQMAPAVEATLMKSYADVHQVSEADARLWLQQLEEKGRYAKDVWAG

SEQ ID NO: 737 - DNA, 3147 bp, synthetic construct
  misc_feature 1..3147: note = Variant of cytochrome P450
  source 1..3147: mol_type = other DNA
atgacaattaaggaaatgcctcagcctaagacgtttggagaacttaaaaatttaccgttattaaacacagataaaccggttcaagctttgatgcgtattgcggatgaattaggagaaatctttaaattcgaggcgcctggtagcgtaacgcgctttttatcaagtcagcgtctaattaaagaagcatgcgatgaaagccgctttgataaaaacttaagtcaaggccttaaatttgcacgtgattttcttggagacgggttatttacaagctggacgcatgaaccgaattggaaaaaagcgcataatatcttaggcccaagctttagtcagcatgcaatgggccgttatcatgcgatgatggtcgatatcgccgtgcagcttgttcaaaagtgggagcgtctaaatgcagatgagcatattgaagtatcggaagacatgacacgtttaacgctggatacaattggtctttgcggcttcaactatcgctttaacagcttttaccgagatcagccgcatccatttattgtgagtgttgagggtgcactggatgaagtaatgaacaagctgcagcgagcaaatccagacgacccagcttatgatgaaaacaagcgccagtgtcaagaagacatcaaggtgatgaacgactatgtcgataaaattattgcagatcgcaaagcaaggggtgaacaaagccatgatttattaacgcagatgctaaacggaaaagatccagcaacgggtgagccgcttgatgacgggaacattcgttatcaaattctgacattcttaattgcgggacacgaaacaacaagtggtcttttatcatttgcgctgtatttcttagtgaaaaatccacatgtattacaaaaagtagcagaagaagcagcacgagttctagtagatcctgttccaagctacaaacaagtcaaacagcttaaatatgtcggcatggtcttaaacgaagcgctgcgcttatggccaactgctcctgcgttttccctatatgcaaaagaagatacggtacttggaggagaatatcctttaaccaaaggcgacgaagtaatggttctgattcctcagcttcaccgtgataaaacaatttggggagacgatgtggaggaattccgtccagagcgttttgaaaatccaagtgcgattccgcagcatgcgtttaaaccgtttggaaacggtcagcgtgcgtgtatcggttggcagttcgctcttcatgaagcaacgctggtacttggtatgatgctaaaacactttgactttgaagatcatacaaactacgagctcgttattaaagaaaagttaacgttaaaacctgaaggctttgtggtaaaagcaaaatcgaaaggcattccgcttggcctgattccttcacctagcactgaacagtctgctaaaaaagtacgcaaaaaggcagaaaacgctcataatacgccgctgcttgtgctatacggttcaaatgcgggaacagctgaaggaacggcgcgtgatttagcagatattgcaatgagcaaaggatttgcaccgcaggtcgcaacgcttgattcacacgccggaaatcttccgcgcgaaggagctgtattaattgtaacggcgtcttataacggtcatccgcctgataacgcaaagcagtttgtcgactggttagaccaagcgtctgctgatgaagtaaaaggcgttcgctactccgtatttggatgcggcgataaaaactgggctgcgacgtatcaaaaagtgcctgcttttatcgatgaaacgcttgccgctaaaggggcagaaaacatcgctgaccgcggtttcggtgatgcaagcgacgactttgaaggcgcgtatgaagaatggagtgatcatatgtggcaagacgtagcagcctactttaacctcgacattgaaaacagtgaagataataaatctactcttagccttcaatttgtcgacagcgccgcggatatgccgcttgcgaaaatgcacggtgcgttttcaacgaacgtcgtagcaagcaaagaacttcaacagccaggcagtgcacgaagcacgcgacatcttgaaattgaacttccaaaagaagcttcttatcaagaaggagatcatttaggtgttattcctcgcaactatgaaggaatagtaaaccgtgtaacagcaaggttcggcctaagcgcatcacagctgatccgtctggaagcagaagaagaaaaattagctcatttgccactcgctaaaacagtatccgtagaagagcttctgcaatacgtggagcttcaagatcctgttacgcgcacgcagcttcgcgcaatggctgctaaaacggtctgcccgccgcataaagtagagcttgaagccttgcttgaaaagcaagcctacaaagaacaagtgctggcaaaacgtttaacaatgcttgaactgcttgaaaaatacccggcgtgtgaaatgaaattcagcgaatttatcgcccttctgccaagcatacgcccgcgctattactcgatttcttcatcacctcgtgtcgatgaaaaacaagcaagcatcacggtcagcgttgtctcaggaccagcgtggagcggatatggagaatataaaggaattgcgtcgaactatcttgccgagctgcaagaaggagatacgattacgtgctttatttccacagatcagtcagaatttacgctgccaaaagaccctctgactccgcttatcatggtcggaccgggaacaggcgtcgcgccgtttagaggctttgtgcaggcgcgcaaacagctaaaagaacaaggacagtcacttggagaagcacatttatacttcggctgccgttcacctcatgaagactatctgtatcaagaagagcttgaaaacgcccaaagcgaaggcatcattacgcttcataccgctttttctcgcatgccaaatcagccgaaaacatacgttcagcacgtaatggaacaagacggcaagaaattgattgaacttcttgatcaaggagcgcacttctatatctgcggagacggaagccaaatggcacctgccgttgaagcaacgcttatgaaaagctatgctgacgttcaccaagtgagtgaggcagacgctcgcttatggctgcagcagctagaagaaaaaggccgatacgcaaaagacgtgtgggctggg

SEQ ID NO: 738 - protein, 1049 aa, synthetic construct
  REGION 1..1049: note = Variant of cytochrome P450
MTIKEMPQPKTFGELKNLPLLNTDKPVQALMRIADELGEIFKFEAPGSVTRFLSSQRLIKEACDESRFDKNLSQGLKFARDFLGDGLFTSWTHEPNWKKAHNILGPSFSQHAMGRYHAMMVDIAVQLVQKWERLNADEHIEVSEDMTRLTLDTIGLCGFNYRFNSFYRDQPHPFIVSVEGALDEVMNKLQRANPDDPAYDENKRQCQEDIKVMNDYVDKIIADRKARGEQSHDLLTQMLNGKDPATGEPLDDGNIRYQILTFLIAGHETTSGLLSFALYFLVKNPHVLQKVAEEAARVLVDPVPSYKQVKQLKYVGMVLNEALRLWPTAPAFSLYAKEDTVLGGEYPLTKGDEVMVLIPQLHRDKTIWGDDVEEFRPERFENPSAIPQHAFKPFGNGQRACIGWQFALHEATLVLGMMLKHFDFEDHTNYELVIKEKLTLKPEGFVVKAKSKGIPLGLIPSPSTEQSAKKVRKKAENAHNTPLLVLYGSNAGTAEGTARDLADIAMSKGFAPQVATLDSHAGNLPREGAVLIVTASYNGHPPDNAKQFVDWLDQASADEVKGVRYSVFGCGDKNWAATYQKVPAFIDETLAAKGAENIADRGFGDASDDFEGAYEEWSDHMWQDVAAYFNLDIENSEDNKSTLSLQFVDSAADMPLAKMHGAFSTNVVASKELQQPGSARSTRHLEIELPKEASYQEGDHLGVIPRNYEGIVNRVTARFGLSASQLIRLEAEEEKLAHLPLAKTVSVEELLQYVELQDPVTRTQLRAMAAKTVCPPHKVELEALLEKQAYKEQVLAKRLTMLELLEKYPACEMKFSEFIALLPSIRPRYYSISSSPRVDEKQASITVSVVSGPAWSGYGEYKGIASNYLAELQEGDTITCFISTDQSEFTLPKDPLTPLIMVGPGTGVAPFRGFVQARKQLKEQGQSLGEAHLYFGCRSPHEDYLYQEELENAQSEGIITLHTAFSRMPNQPKTYVQHVMEQDGKKLIELLDQGAHFYICGDGSQMAPAVEATLMKSYADVHQVSEADARLWLQQLEEKGRYAKDVWAG

SEQ ID NO: 739 - DNA, 3147 bp, synthetic construct
  misc_feature 1..3147: note = Variant of cytochrome P450
  source 1..3147: mol_type = other DNA
atgacaattaaggaaatgcctcagcctaagacgtttggagaacttaaaaatttaccgttattaaacacagataaaccggttcaagctttgatgcgtattgcggatgaattaggagaaatctttaaattcgaggcgcctggtagcgtaacgcgctttttatcaagtcagcgtctaattaaagaagcatgcgatgaacgtcgctttgataaaaacttaagtcaaggccttaaatttgcacgtgattttcttggagacgggttatttacaagctggacgcatgaaccgaattggaaaaaagcgcataatatcttaggcccaagctttagtcagctggcaatgggccgttatcatgcgatgatggtcgatatcgccgtgcagcttgttcaaaagtgggagcgtctaaatgcagatgagcatattgaagtatcggaagacatgacacgtttaacgctggatacaattggtctttgcggcttcaactatcgctttaacagcttttaccgagatcagccgcatccatttattgtgagtgttgagggtgcactggatgaagtaatgaacaagctgcagcgagcaaatccagacgacccagcttatgatgaaaacaagcgccagtgtcaagaagacatcaaggtgatgaacgactatgtcgataaaattattgcagatcgcaaagcaaggggtgaacaaagccatgatttattaacgcagatgctaaacggaaaagatccagcaacgggtgagccgcttgatgacgggaacattcgttatcaaattctgacattcttaattgcgggacacgaaacaacaagtggtcttttatcatttgcgctgtatttcttagtgaaaaatccacatgtattacaaaaagtagcagaagaagcagcacgagttctagtagatcctgttccaagctacaaacaagtcaaacagcttaaatatgtcggcatggtcttaaacgaagcgctgcgcttatggccaactgctcctgcgttttccctatatgcaaaagaagatacggtacttggaggagaatatcctttaaccaaaggcgacgaagtaatggttctgattcctcagcttcaccgtgataaaacaatttggggagacgatgtggagtcgttccgtccagagcgttttgaaaatccaagtgcgattccgcagcatgcgtttaaaccgtttggaaacggtcagcgtgcgtgtatcggttggcagttcgctcttcatgaagcaacgctggtacttggtatgatgctaaaacactttgactttgaagatcatacaaactacgagctcgttattaaagaaaagttaacgttaaaacctgaaggctttgtggtaaaagcaaaatcgaaaggcattccgcttggcctgattccttcacctagcactgaacagtctgctaaaaaagtacgcaaaaaggcagaaaacgctcataatacgccgctgcttgtgctatacggttcaaatgcgggaacagctgaaggaacggcgcgtgatttagcagatattgcaatgagcaaaggatttgcaccgcaggtcgcaacgcttgattcacacgccggaaatcttccgcgcgaaggagctgtattaattgtaacggcgtcttataacggtcatccgcctgataacgcaaagcagtttgtcgactggttagaccaagcgtctgctgatgaagtaaaaggcgttcgctactccgtatttggatgcggcgataaaaactgggctgcgacgtatcaaaaagtgcctgcttttatcgatgaaacgcttgccgctaaaggggcagaaaacatcgctgacatgggtttcggtgatgcaagcgacgactttgaaggcgcgtatgaagaatggagtgatcatatgtggagtgacgtagcagcctactttaacctcgacattgaaaacagtgaagataataaatctactctttcacttcaatttgtcgacagcgccgcggatatgccgcttgcgaaaatgcacggtgcgttttcaacgaacgtcgtagcaagcaaagaacttcaacagccaggcagtgcacgaagcacgcgacatcttgaaattgaacttccaaaagaagcttcttatcaagaaggagatcatttaggtgttattcctcgcaactatgaaggaatagtaaaccgtgtaacagcaaggttcggcctaagcgcatcacagctgatccgtctggaagcagaagaagaaaaattagctcatttgccactcgctaaaacagtatccgtagaagagcttctgcaatacgtggagcttcaagatcctgttacgcgcacgcagcttcgcgcaatggctgctaaaacggtctgcccgccgcataaagtagagcttgaagccttgcttgaaaagcaagcctacaaagaacaagtgctggcaaaacgtttaacaatgcttgaactgcttgaaaaatacccggcgtgtgaaatgaaattcagcgaatttatcgcccttctgccaagcatacgcccgcgctattactcgatttcttcatcacctcgtgtcgatgaaaaacaagcaagcatcacggtcagcgttgtctcaggagacgcgtggagcggatatggagaatataaaggaattgcgtcgaactatcttgccgagctgcaagaaggagatacgattacgtgctttatttccacagatcagtcagaatttacgctgccaaaagaccctgaaacgccgcttatcatggtcggaccgggaacaggcgtcgcgccgtttagaggctttgtgcaggcgcgcaaacagctaaaagaacaaggacagtcacttggagaagcacatttatacttcggctgccgttcacctcatgaagactatctgtatcaagaagagcttgaaaacgcccaaagcgaaggcatcattacgcttcataccgctttttctcgcatgccaaatcagccgaaaacatacgttcagcacgtaatggaacaagacggcaagaaattgattgaacttcttgatcaaggagcgcacttctatatctgcggagacggaagccaaatggcacctgccgttgaagcaacgcttatgaaaagctatgctgacgttcaccaagtgagttatgcagacgctcgcttatggctgcagcagctagaagaaaaaggccgatacgcaaaagacgtgtgggctggg

SEQ ID NO: 740 - protein, 1049 aa, synthetic construct
  REGION 1..1049: note = Variant of cytochrome P450
MTIKEMPQPKTFGELKNLPLLNTDKPVQALMRIADELGEIFKFEAPGSVTRFLSSQRLIKEACDERRFDKNLSQGLKFARDFLGDGLFTSWTHEPNWKKAHNILGPSFSQLAMGRYHAMMVDIAVQLVQKWERLNADEHIEVSEDMTRLTLDTIGLCGFNYRFNSFYRDQPHPFIVSVEGALDEVMNKLQRANPDDPAYDENKRQCQEDIKVMNDYVDKIIADRKARGEQSHDLLTQMLNGKDPATGEPLDDGNIRYQILTFLIAGHETTSGLLSFALYFLVKNPHVLQKVAEEAARVLVDPVPSYKQVKQLKYVGMVLNEALRLWPTAPAFSLYAKEDTVLGGEYPLTKGDEVMVLIPQLHRDKTIWGDDVESFRPERFENPSAIPQHAFKPFGNGQRACIGWQFALHEATLVLGMMLKHFDFEDHTNYELVIKEKLTLKPEGFVVKAKSKGIPLGLIPSPSTEQSAKKVRKKAENAHNTPLLVLYGSNAGTAEGTARDLADIAMSKGFAPQVATLDSHAGNLPREGAVLIVTASYNGHPPDNAKQFVDWLDQASADEVKGVRYSVFGCGDKNWAATYQKVPAFIDETLAAKGAENIADMGFGDASDDFEGAYEEWSDHMWSDVAAYFNLDIENSEDNKSTLSLQFVDSAADMPLAKMHGAFSTNVVASKELQQPGSARSTRHLEIELPKEASYQEGDHLGVIPRNYEGIVNRVTARFGLSASQLIRLEAEEEKLAHLPLAKTVSVEELLQYVELQDPVTRTQLRAMAAKTVCPPHKVELEALLEKQAYKEQVLAKRLTMLELLEKYPACEMKFSEFIALLPSIRPRYYSISSSPRVDEKQASITVSVVSGDAWSGYGEYKGIASNYLAELQEGDTITCFISTDQSEFTLPKDPETPLIMVGPGTGVAPFRGFVQARKQLKEQGQSLGEAHLYFGCRSPHEDYLYQEELENAQSEGIITLHTAFSRMPNQPKTYVQHVMEQDGKKLIELLDQGAHFYICGDGSQMAPAVEATLMKSYADVHQVSYADARLWLQQLEEKGRYAKDVWAG

SEQ ID NO: 741 - DNA, 3147 bp, synthetic construct
  misc_feature 1..3147: note = Variant of cytochrome P450
  source 1..3147: mol_type = other DNA
atgacaattaaggaaatgcctcagcctaagacgtttggagaacttaaaaatttaccgttattaaacacagataaaccggttcaagctttgatgcgtattgcggatgaattaggagaaatctttaaattcgaggcgcctggtagcgtaacgcgctttttatcaagtcagcgtctaattaaagaagcatgcgatgaaagtcgctttgataaaaacttaagtcaaggccttaaatttgcacgtgattttcttggagacgggttatttacaagctggacgcatgaaccgaattggaaaaaagcgcataatatcttaggcccaagctttagtcagctggcaatgggccgttatcatgcgatgatggtcgatatcgccgtgcagcttgttcaaaagtgggagcgtctaaatgcagatgagcatattgaagtatcggaagacatgacacgtttaacgctggatacaattggtctttgcggcttcaactatcgctttaacagcttttaccgagatcagccgcatccatttattgtgagtgttgagggtgcactggatgaagtaatgaacaagctgcagcgagcaaatccagacgacccagcttatgatgaaaacaagcgccagtgtcaagaagacatcaaggtgatgaacgactatgtcgataaaattattgcagatcgcaaagcaaggggtgaacaaagccatgatttattaacgcagatgctaaacggaaaagatccagcaacgggtgagccgcttgatgacgggaacattcgttatcaaattctgacattcttaattgcgggacacgaaacaacaagtggtcttttatcatttgcgctgtatttcttagtgaaaaatccacatgtattacaaaaagtagcagaagaagcagcacgagttctagtagatcctgttccaagctacaaacaagtcaaacagcttaaatatgtcggcatggtcttaaacgaagcgctgcgcttatggccaactgctcctgcgttttccctatatgcaaaagaagatacggtacttggaggagaatatcctttaaccaaaggcgacgaagtaatggttctgattcctcagcttcaccgtgataaaacaatttggggagacgatgtggaggaattccgtccagagcgttttgaaaatccaagtgcgattccgcagcatgcgtttaaaccgtttggaaacggtcagcgtgcgtgtatcggttggcagttcgctcttcatgaagcaacgctggtacttggtatgatgctaaaacactttgactttgaagatcatacaaactacgagctcgttattaaagaaaagttaacgttaaaacctgaaggctttgtggtaaaagcaaaatcgaaaggcattccgcttggcctgattccttcacctagcactgaacagtctgctaaaaaagtacgcaaaaaggcagaaaacgctcataatacgccgctgcttgtgctatacggttcaaatgcgggaacagctgaaggaacggcgcgtgatttagcagatattgcaatgagcaaaggatttgcaccgcaggtcgcaacgcttgattcacacgccggaaatcttccgcgcgaaggagctgtattaattgtaacggcgtcttataacggtcatccgcctgataacgcaaagcagtttgtcgactggttagaccaagcgtctgctgatgaagtaaaaggcgttcgctactccgtatttggatgcggcgataaaaactgggctgcgacgtatcaaaaagtgcctgcttttatcgatgaaacgcttgccgctaaaggggcagaaaacatcgctgaccgcggtgagggtgatgcaagcgacgactttgaaggcgcgtatgaagaatggagtgatcatatgtggagcgacgtagcagcctactttaacctcgacattgaaaacagtgaagataataaatctactctttcacttcaatttgtcgacagcgccgcggatatgccgcttgcgaaaatgcacggtgcgttttcaacgaacgtcgtagcaagcaaagaacttcaacagccaggcagtgcacgaagcacgcgacatcttgaaattgaacttccaaaagaagcttcttatcaagaaggagatcatttaggtgttattcctcgcaactatgaaggaatagtaaaccgtgtaacagcaaggttcggcctaagcgcatcacagctgatccgtctggaagcagaagaagaaaaattagctcatttgccactcgctaaaacagtatccgtagaagagcttctgcaatacgtggagcttcaagatcctgttacgcgcacgcagcttcgcgcaatggctgctaaaacggtctgcccgccgcataaagtagagcttgaagccttgcttgaaaagcaagcctacaaagaacaagtgctggcaaaacgtttaacaatgcttgaactgcttgaaaaatacccggcgtgtgaaatgaaattcagcgaatttatcgcccttctgccaagcatacgcccgcgctattactcgatttcttcatcacctcgtgtcgatgaaaaacaagcaagcatcacggtcagcgttgtctcaggagacgcgtggagcggatatggagaatataaaggaattgcgtcgaactatcttgccgagctgcaagaaggagatacgattacgtgctttatttccacagatcagtcagaatttacgctgccaaaagaccctgaaactccgcttatcatggtcggaccgggaacaggcgtcgcgccgtttagaggctttgtgcaggcgcgcaaacagctaaaagaacaaggacagtcacttggagaagcacatttatacttcggctgccgttcacctcatgaagactatctgtatcaagaagagcttgaaaacgcccaaagcgaaggcatcattacgcttcataccgctttttctcgcatgccaaatcagccgaaaacatacgttcagcacgtaatggaacaagacggcaagaaattgattgaacttcttgatcaaggagcgcacttctattgttgcggagacggaagccaaatggcacctgccgttgaagcaacgcttatgaaaagctatgctgacgttcaccaagtgagttatgcagacgctcgcttatggctgcagcagctagaagaaaaaggccgatacgcaaaagacgtgtgggctggg

SEQ ID NO: 742 - protein, 1049 aa, synthetic construct
  REGION 1..1049: note = Variant of cytochrome P450
MTIKEMPQPKTFGELKNLPLLNTDKPVQALMRIADELGEIFKFEAPGSVTRFLSSQRLIKEACDESRFDKNLSQGLKFARDFLGDGLFTSWTHEPNWKKAHNILGPSFSQLAMGRYHAMMVDIAVQLVQKWERLNADEHIEVSEDMTRLTLDTIGLCGFNYRFNSFYRDQPHPFIVSVEGALDEVMNKLQRANPDDPAYDENKRQCQEDIKVMNDYVDKIIADRKARGEQSHDLLTQMLNGKDPATGEPLDDGNIRYQILTFLIAGHETTSGLLSFALYFLVKNPHVLQKVAEEAARVLVDPVPSYKQVKQLKYVGMVLNEALRLWPTAPAFSLYAKEDTVLGGEYPLTKGDEVMVLIPQLHRDKTIWGDDVEEFRPERFENPSAIPQHAFKPFGNGQRACIGWQFALHEATLVLGMMLKHFDFEDHTNYELVIKEKLTLKPEGFVVKAKSKGIPLGLIPSPSTEQSAKKVRKKAENAHNTPLLVLYGSNAGTAEGTARDLADIAMSKGFAPQVATLDSHAGNLPREGAVLIVTASYNGHPPDNAKQFVDWLDQASADEVKGVRYSVFGCGDKNWAATYQKVPAFIDETLAAKGAENIADRGEGDASDDFEGAYEEWSDHMWSDVAAYFNLDIENSEDNKSTLSLQFVDSAADMPLAKMHGAFSTNVVASKELQQPGSARSTRHLEIELPKEASYQEGDHLGVIPRNYEGIVNRVTARFGLSASQLIRLEAEEEKLAHLPLAKTVSVEELLQYVELQDPVTRTQLRAMAAKTVCPPHKVELEALLEKQAYKEQVLAKRLTMLELLEKYPACEMKFSEFIALLPSIRPRYYSISSSPRVDEKQASITVSVVSGDAWSGYGEYKGIASNYLAELQEGDTITCFISTDQSEFTLPKDPETPLIMVGPGTGVAPFRGFVQARKQLKEQGQSLGEAHLYFGCRSPHEDYLYQEELENAQSEGIITLHTAFSRMPNQPKTYVQHVMEQDGKKLIELLDQGAHFYCCGDGSQMAPAVEATLMKSYADVHQVSYADARLWLQQLEEKGRYAKDVWAG

SEQ ID NO: 743 - DNA, 3147 bp, synthetic construct
  misc_feature 1..3147: note = Variant of cytochrome P450
  source 1..3147: mol_type = other DNA
atgacaattaaggaaatgcctcagcctaagacgtttggagaacttaaaaatttaccgttattaaacacagataaaccggttcaagctttgatgcgtattgcggatgaattaggagaaatctttaaattcgaggcgcctggtagcgtaacgcgctttttatcaagtcagcgtctaattaaagaagcatgcgatgaacgtcgctttgataaaaacttaagtcaaggccttaaatttgcacgtgattttcttggagacgggttatttacaagctggacgcatgaaccgaattggaaaaaagcgcataatatcttaggcccaagctttagtcagctggcaatgggccgttatcatgcgatgatggtcgatatcgccgtgcagcttgttcaaaagtgggagcgtctaaatgcagatgagcatattgaagtatcggaagacatgacacgtttaacgctggatacaattggtctttgcggcttcaactatcgctttaacagcttttaccgagatcagccgcatccatttattgtgagtgttgagggtgcactggatgaagtaatgaacaagctgcagcgagcaaatccagacgacccagcttatgatgaaaacaagcgccagtgtcaagaagacatcaaggtgatgaacgactatgtcgataaaattattgcagatcgcaaagcaaggggtgaacaaagccatgatttattaacgcagatgctaaacggaaaagatccagcaacgggtgagccgcttgatgacgggaacattcgttatcaaattctgacattcttaattgcgggacacgaaacaacaagtggtcttttatcatttgcgctgtatttcttagtgaaaaatccacatgtattacaaaaagtagcagaagaagcagcacgagttctagtagatcctgttccaagctacaaacaagtcaaacagcttaaatatgtcggcatggtcttaaacgaagcgctgcgcttatggccaactgctcctgcgttttccctatatgcaaaagaagatacggtacttggaggagaatatcctttaaccaaaggcgacgaagtaatggttctgattcctcagcttcaccgtgataaaacaatttggggagacgatgtggaggaattccgtccagagcgttttgaaaatccaagtgcgattccgcagcatgcgtttaaaccgtttggaaacggtcagcgtgcgtgtatcggttggcagttcgctcttcatgaagcaacgctggtacttggtatgatgctaaaacactttgactttgaagatcatacaaactacgagctcgttattaaagaaaagttaacgttaaaacctgaaggctttgtggtaaaagcaaaatcgaaaggcattccgcttggcctgattccttcacctagcactgaacagtctgctaaaaaagtacgcaaaaaggcagaaaacgctcataatacgccgctgcttgtgctatacggttcaaatgcgggaacagctgaaggaacggcgcgtgatttagcagatattgcaatgagcaaaggatttgcaccgcaggtcgcaacgcttgattcacacgccggaaatcttccgcgcgaaggagctgtattaattgtaacggcgtcttataacggtcatccgcctgataacgcaaagcagtttgtcgactggttagaccaagcgtctgctgatgaagtaaaaggcgttcgctactccgtatttggatgcggcgataaaaactgggctgcgacgtatcaaaaagtgcctgcttttatcgatgaaacgcttgccgctaaaggggcagaaaacatcgctgacatgggtttcggtgatgcaagcgacgactttgaaggcgcgtatgaagaatggagtgatcatatgtggagtgacgtagcagcctactttaacctcgacattgaaaacagtgaagataataaatctactctttcacttcaatttgtcgacagcgccgcggatatgccgcttgcgaaaatgcacggtgcgttttcaacgaacgtcgtagcaagcaaagaacttcaacagccaggcagtgcacgaagcacgcgacatcttgaaattgaacttccaaaagaagcttcttatcaagaaggagatcatttaggtgttattcctcgcaactatgaaggaatagtaaaccgtgtaacagcaaggttcggcctaagcgcatcacagcagatccgtctggaagcagaagaagaaaaattagctcatttgccactcgctaaaacagtatccgtagaagagcttctgcaatacgtggagcttcaagatcctgttacgcgcacgcagcttcgcgcaatggctgctaaaacggtctgcccgccgcataaagtagagcttgaagccttgcttgaaaagcaagcctacaaagaacaagtgctggcaaaacgtttaacaatgcttgaactgcttgaaaaatacccggcgtgtgaaatgaaattcagcgaatttatcgcccttctgccaagcatacgcccgcgctattactcgatttcttcatcacctcgtgtcgatgaaaaacaagcaagcatcacggtcagcgttgtctcaggaccagcgtggagcggatatggagaatataaaggaattgcgtcgaactatcttgccgagctgcaagaaggagatacgattacgtgctttatttccacagatcagtcagaatttacgctgccaaaagaccctctgactccgcttatcatggtcggaccgggaacaggcgtcgcgccgtttagaggctttgtgcaggcgcgcaaacagctaaaagaacaaggacagtcacttggagaagcacatttatacttcggctgccgttcacctcatgaagactatctgtatcaagaagagcttgaaaacgcccaaagcgaaggcatcattacgcttcataccgctttttctcgcatgccaaatcagccgaaaacatacgttcagcacgtaatggaacaagacggcaagaaattgattgaacttcttgatcaaggagcgcacttctatatctgcggagacggaagccaaatggcacctgccgttgaagcaacgcttatgaaaagctatgctgacgttcaccaagtgagtgaggcagacgctcgcttatggctgcagcagctagaagaaaaaggccgatacgcaaaagacgtgtgggctggg

SEQ ID NO: 744 - protein, 1049 aa, synthetic construct
  REGION 1..1049: note = Variant of cytochrome P450
MTIKEMPQPKTFGELKNLPLLNTDKPVQALMRIADELGEIFKFEAPGSVTRFLSSQRLIKEACDERRFDKNLSQGLKFARDFLGDGLFTSWTHEPNWKKAHNILGPSFSQLAMGRYHAMMVDIAVQLVQKWERLNADEHIEVSEDMTRLTLDTIGLCGFNYRFNSFYRDQPHPFIVSVEGALDEVMNKLQRANPDDPAYDENKRQCQEDIKVMNDYVDKIIADRKARGEQSHDLLTQMLNGKDPATGEPLDDGNIRYQILTFLIAGHETTSGLLSFALYFLVKNPHVLQKVAEEAARVLVDPVPSYKQVKQLKYVGMVLNEALRLWPTAPAFSLYAKEDTVLGGEYPLTKGDEVMVLIPQLHRDKTIWGDDVEEFRPERFENPSAIPQHAFKPFGNGQRACIGWQFALHEATLVLGMMLKHFDFEDHTNYELVIKEKLTLKPEGFVVKAKSKGIPLGLIPSPSTEQSAKKVRKKAENAHNTPLLVLYGSNAGTAEGTARDLADIAMSKGFAPQVATLDSHAGNLPREGAVLIVTASYNGHPPDNAKQFVDWLDQASADEVKGVRYSVFGCGDKNWAATYQKVPAFIDETLAAKGAENIADMGFGDASDDFEGAYEEWSDHMWSDVAAYFNLDIENSEDNKSTLSLQFVDSAADMPLAKMHGAFSTNVVASKELQQPGSARSTRHLEIELPKEASYQEGDHLGVIPRNYEGIVNRVTARFGLSASQQIRLEAEEEKLAHLPLAKTVSVEELLQYVELQDPVTRTQLRAMAAKTVCPPHKVELEALLEKQAYKEQVLAKRLTMLELLEKYPACEMKFSEFIALLPSIRPRYYSISSSPRVDEKQASITVSVVSGPAWSGYGEYKGIASNYLAELQEGDTITCFISTDQSEFTLPKDPLTPLIMVGPGTGVAPFRGFVQARKQLKEQGQSLGEAHLYFGCRSPHEDYLYQEELENAQSEGIITLHTAFSRMPNQPKTYVQHVMEQDGKKLIELLDQGAHFYICGDGSQMAPAVEATLMKSYADVHQVSEADARLWLQQLEEKGRYAKDVWAG

SEQ ID NO: 745 - DNA, 3147 bp, synthetic construct
  misc_feature 1..3147: note = Variant of cytochrome P450
  source 1..3147: mol_type = other DNA
atgacaattaaggaaatgcctcagcctaagacgtttggagaacttaaaaatttaccgttattaaacacagataaaccggttcaagctttgatgcgtattgcggatgaattaggagaaatctttaaattcgaggcgcctggtagcgtaacgcgctttttatcaagtcagcgtctaattaaagaagcatgcgatgaacgtcgctttgataaaaacttaagtcaaggccttaaatttgcacgtgattttcttggagacgggttatttacaagctggacgcatgaaccgaattggaaaaaagcgcataatatcttaggcccaagctttagtcagctggcaatgcgccgttatcatgcgatgatggtcgatatcgccgtgcagcttgttcaaaagtgggagcgtctaaatgcagatgagcatattgaagtatcggaagacatgacacgtttaacgctggatacaattggtctttgcggcttcaactatcgctttaacagcttttaccgagatcagccgcatccatttattgtgagtgttgagggtgcactggatgaagtaatgaacaagctgcagcgagcaaatccagacgacccagcttatgatgaaaacaagcgccagtgtcaagaagacatcaaggtgatgaacgactatgtcgataaaattattgcagatcgcaaagcaaggggtgaacaaagccatgatttattaacgcagatgctaaacggaaaagatccagcaacgggtgagccgcttgatgacgggaacattcgttatcaaattctgacattcttaattgcgggacacgaaacaacaagtggtcttttatcatttgcgctgtatttcttagtgaaaaatccacatgtattacaaaaagtagcagaagaagcagcacgagttctagtagatcctgttccaagctacaaacaagtcaaacagcttaaatatgtcggcatggtcttaaacgaagcgctgcgcttatggccaactgctcctgcgttttccctatatgcaaaagaagatacggtacttggaggagaatatcctttaaccaaaggcgacgaagtaatggttctgattcctcagcttcaccgtgataaaacaatttggggagacgatgtggaggaattccgtccagagcgttttgaaaatccaagtgcgattccgcagcatgcgtttaaaccgtttggaaacggtcagcgtgcgtgtatcggttggcagttcgctcttcatgaagcaacgctggtacttggtatgatgctaaaacactttgactttgaagatcatacaaactacgagctcgttattaaagaaaagttaacgttaaaacctgaaggctttgtggtaaaagcaaaatcgaaaggcattccgcttggcctgattccttcacctagcactgaacagtctgctaaaaaagtacgcaaaaaggcagaaaacgctcataatacgccgctgcttgtgctatacggttcaaatgcgggaacagctgaaggaacggcgcgtgatttagcagatattgcaatgagcaaaggatttgcaccgcaggtcgcaacgcttgattcacacgccggaaatcttccgcgcgaaggagctgtattaattgtaacggcgtcttataacggtcatccgcctgataacgcaaagcagtttgtcgactggttagaccaagcgtctgctgatgaagtaaaaggcgttcgctactccgtatttggatgcggcgataaaaactgggctgcgacgtatcaaaaagtgcctgcttttatcgatgaaacgcttgccgctaaaggggcagaaaacatcgctgacatgggtgagggtgatgcaagcgacgactttgaaggcgcgtatgaagaatggagtgatcatatgtggagcgacgtagcagcctactttaacctcgacattgaaaacagtgaagataataaatctactctttcacttcaatttgtcgacagcgccgcggatatgccgcttgcgaaaatgcacggtgcgttttcaacgaacgtcgtagcaagcaaagaacttcaacagccaggcagtgcacgaagcacgcgacatcttgaaattgaacttccaaaagaagcttcttatcaagaaggagatcatttaggtgttattcctcgcaactatgaaggaatagtaaaccgtgtaacagcaaggttcggcctaagcgcatcacagctgatccgtctggaagcagaagaagaaaaattagctcatttgccactcgctaaaacagtatccgtagaagagcttctgcaatacgtggagcttcaagatcctgttacgcgcacgcagcttcgcgcaatggctgctaaaacggtctgcccgccgcataaagtagagcttgaagccttgcttgaaaagcaagcctacaaagaacaagtgctggcaaaacgtttaacaatgcttgaactgcttgaaaaatacccggcgtgtgaaatgaaattcagcgaatttatcgcccttctgccaagcatacgcccgcgctattactcgatttcttcatcacctcgtgtcgatgaaaaacaagcaagcatcacggtcagcgttgtctcaggaccagcgtggagcggatatggagaatataaaggaattgcgtcgaactatcttgccgagctgcaagaaggagatacgattacgtgctttatttccacagatcagtcagaatttacgctgccaaaagaccctgaaacgccgcttatcatggtcggaccgggaacaggcgtcgcgccgtttagaggctttgtgcaggcgcgcaaacagctaaaagaacaaggacagtcacttggagaagcacatttatacttcggctgccgttcacctcatgaagactatctgtatcaagaagagcttgaaaacgcccaaagcgaaggcatcattacgcttcataccgctttttctcgcatgccaaatcagccgaaaacatacgttcagcacgtaatggaacaagacggcaagaaattgattgaacttcttgatcaaggagcgcacttctattgttgcggagacggaagccaaatggcacctgccgttgaagcaacgcttatgaaaagctatgctgacgttcaccaagtgagtgaggcagacgctcgcttatggctgcagcagctagaagaaaaaggccgatacgcaaaagacgtgtgggctggg

SEQ ID NO: 746 - protein, 1049 aa, synthetic construct
  REGION 1..1049: note = Variant of cytochrome P450
MTIKEMPQPKTFGELKNLPLLNTDKPVQALMRIADELGEIFKFEAPGSVTRFLSSQRLIKEACDERRFDKNLSQGLKFARDFLGDGLFTSWTHEPNWKKAHNILGPSFSQLAMRRYHAMMVDIAVQLVQKWERLNADEHIEVSEDMTRLTLDTIGLCGFNYRFNSFYRDQPHPFIVSVEGALDEVMNKLQRANPDDPAYDENKRQCQEDIKVMNDYVDKIIADRKARGEQSHDLLTQMLNGKDPATGEPLDDGNIRYQILTFLIAGHETTSGLLSFALYFLVKNPHVLQKVAEEAARVLVDPVPSYKQVKQLKYVGMVLNEALRLWPTAPAFSLYAKEDTVLGGEYPLTKGDEVMVLIPQLHRDKTIWGDDVEEFRPERFENPSAIPQHAFKPFGNGQRACIGWQFALHEATLVLGMMLKHFDFEDHTNYELVIKEKLTLKPEGFVVKAKSKGIPLGLIPSPSTEQSAKKVRKKAENAHNTPLLVLYGSNAGTAEGTARDLADIAMSKGFAPQVATLDSHAGNLPREGAVLIVTASYNGHPPDNAKQFVDWLDQASADEVKGVRYSVFGCGDKNWAATYQKVPAFIDETLAAKGAENIADMGEGDASDDFEGAYEEWSDHMWSDVAAYFNLDIENSEDNKSTLSLQFVDSAADMPLAKMHGAFSTNVVASKELQQPGSARSTRHLEIELPKEASYQEGDHLGVIPRNYEGIVNRVTARFGLSASQLIRLEAEEEKLAHLPLAKTVSVEELLQYVELQDPVTRTQLRAMAAKTVCPPHKVELEALLEKQAYKEQVLAKRLTMLELLEKYPACEMKFSEFIALLPSIRPRYYSISSSPRVDEKQASITVSVVSGPAWSGYGEYKGIASNYLAELQEGDTITCFISTDQSEFTLPKDPETPLIMVGPGTGVAPFRGFVQARKQLKEQGQSLGEAHLYFGCRSPHEDYLYQEELENAQSEGIITLHTAFSRMPNQPKTYVQHVMEQDGKKLIELLDQGAHFYCCGDGSQMAPAVEATLMKSYADVHQVSEADARLWLQQLEEKGRYAKDVWAG

SEQ ID NO: 747 - DNA, 3147 bp, synthetic construct
  misc_feature 1..3147: note = Variant of cytochrome P450
  source 1..3147: mol_type = other DNA
atgacaattaaggaaatgcctcagcctaagacgtttggagaacttaaaaatttaccgttattaaacacagataaaccggttcaagctttgatgcgtattgcggatgaattaggagaaatctttaaattcgaggcgcctggtagcgtaacgcgctttttatcaagtcagcgtctaattaaagaagcatgcgatgaaagtcgctttgataaaaacttaagtcaaggccttaaatttgcacgtgattttcttggagacgggttatttacaagctggacgcatgaaccgaattggaaaaaagcgcataatatcttaggcccaagctttagtcagctggcaatgggccgttatcatgcgatgatggtcgatatcgccgtgcagcttgttcaaaagtgggagcgtctaaatgcagatgagcatattgaagtatcggaagacatgacacgtttaacgctggatacaattggtctttgcggcttcaactatcgctttaacagcttttaccgagatcagccgcatccatttattgtgagtgttgagggtgcactggatgaagtaatgaacaagctgcagcgagcaaatccagacgacccagcttatgatgaaaacaagcgccagtgtcaagaagacatcaaggtgatgaacgactatgtcgataaaattattgcagatcgcaaagcaaggggtgaacaaagccatgatttattaacgcagatgctaaacggaaaagatccagcaacgggtgagccgcttgatgacgggaacattcgttatcaaattctgacattcttaattgcgggacacgaaacaacaagtggtcttttatcatttgcgctgtatttcttagtgaaaaatccacatgtattacaaaaagtagcagaagaagcagcacgagttctagtagatcctgttccaagctacaaacaagtcaaacagcttaaatatgtcggcatggtcttaaacgaagcgctgcgcttatggccaactgctcctgcgttttccctatatgcaaaagaagatacggtacttggaggagaatatcctttaaccaaaggcgacgaagtaatggttctgattcctcagcttcaccgtgataaaacaatttggggagacgatgtggaggaattccgtccagagcgttttgaaaatccaagtgcgattccgcagcatgcgtttaaaccgtttggaaacggtcagcgtgcgtgtatcggttggcagttcgctcttcatgaagcaacgctggtacttggtatgatgctaaaacactttgactttgaagatcatacaaactacgagctcgttattaaagaaaagttaacgttaaaacctgaaggctttgtggtaaaagcaaaatcgaaaggcattccgcttggcctgattccttcacctagcactgaacagtctgctaaaaaagtacgcaaaaaggcagaaaacgctcataatacgccgctgcttgtgctatacggttcaaatgcgggaacagctgaaggaacggcgcgtgatttagcagatattgcaatgagcaaaggatttgcaccgcaggtcgcaacgcttgattcacacgccggaaatcttccgcgcgaaggagctgtattaattgtaacggcgtcttataacggtcatccgcctgataacgcaaagcagtttgtcgactggttagaccaagcgtctgctgatgaagtaaaaggcgttcgctactccgtatttggatgcggcgataaaaactgggctgcgacgtatcaaaaagtgcctgcttttatcgatgaaacgcttgccgctaaaggggcagaaaacatcgctgaccgcggtgaagcagatgcaagcgacgactttgaaggcgcgtatgaagaatggagtgatcatatgtggcaagacgtagcagcctactttaacctcgacattgaaaacagtgaagataataaatctactcttacccttcaatttgtcgacagcgccgcggatatgccgcttgcgaaaatgcacggtgcgttttcaacgaacgtcgtagcaagcaaagaacttcaacagccaggcagtgcacgaagcacgcgacatcttgaaattgaacttccaaaagaagcttcttatcaagaaggagatcatttaggtgttattcctcgcaactatgaaggaatagtaaaccgtgtaacagcaaggttcggcctaagcgcatcacagctgatccgtctggaagcagaagaagaaaaattagctcatttgccactcgctaaaacagtatccgtagaagagcttctgcaatacgtggagcttcaagatcctgttacgcgcacgcagcttcgcgcaatggctgctaaaacggtctgcccgccgcataaagtagagcttgaagccttgcttgaaaagcaagcctacaaagaacaagtgctggcaaaacgtttaacaatgcttgaactgcttgaaaaatacccggcgtgtgaaatgaaattcagcgaatttatcgcccttctgccaagcatacgcccgcgctattactcgatttcttcatcacctcgtgtcgatgaaaaacaagcaagcatcacggtcagcgttgtctcaggaccagcgtggagcggatatggagaatataaaggaattgcgtcgaactatcttgccgagctgcaagaaggagatacgattacgtgctttatttccacagatcagtcagaatttacgctgccaaaagaccctgaaactccgcttatcatggtcggaccgggaacaggcgtcgcgccgtttagaggctttgtgcaggcgcgcaaacagctaaaagaacaaggacagtcacttggagaagcacatttatacttcggctgccgttcacctcatgaagactatctgtatcaagaagagcttgaaaacgcccaaagcgaaggcatcattacgcttcataccgctttttctcgcatgccaaatcagccgaaaacatacgttcagcacgtaatggaacaagacggcaagaaattgattgaacttcttgatcaaggagcgcacttctatatctgcggagacggaagccaaatggcacctgccgttgaagcaacgcttatgaaaagctatgctgacgttcaccaagtgagttatgcagacgctcgcttatggctgcagcagctagaagaaaaaggccgatacgcaaaagacgtgtgggctggg

SEQ ID NO: 748 - protein, 1049 aa, synthetic construct
  REGION 1..1049: note = Variant of cytochrome P450
MTIKEMPQPKTFGELKNLPLLNTDKPVQALMRIADELGEIFKFEAPGSVTRFLSSQRLIKEACDESRFDKNLSQGLKFARDFLGDGLFTSWTHEPNWKKAHNILGPSFSQLAMGRYHAMMVDIAVQLVQKWERLNADEHIEVSEDMTRLTLDTIGLCGFNYRFNSFYRDQPHPFIVSVEGALDEVMNKLQRANPDDPAYDENKRQCQEDIKVMNDYVDKIIADRKARGEQSHDLLTQMLNGKDPATGEPLDDGNIRYQILTFLIAGHETTSGLLSFALYFLVKNPHVLQKVAEEAARVLVDPVPSYKQVKQLKYVGMVLNEALRLWPTAPAFSLYAKEDTVLGGEYPLTKGDEVMVLIPQLHRDKTIWGDDVEEFRPERFENPSAIPQHAFKPFGNGQRACIGWQFALHEATLVLGMMLKHFDFEDHTNYELVIKEKLTLKPEGFVVKAKSKGIPLGLIPSPSTEQSAKKVRKKAENAHNTPLLVLYGSNAGTAEGTARDLADIAMSKGFAPQVATLDSHAGNLPREGAVLIVTASYNGHPPDNAKQFVDWLDQASADEVKGVRYSVFGCGDKNWAATYQKVPAFIDETLAAKGAENIADRGEADASDDFEGAYEEWSDHMWQDVAAYFNLDIENSEDNKSTLTLQFVDSAADMPLAKMHGAFSTNVVASKELQQPGSARSTRHLEIELPKEASYQEGDHLGVIPRNYEGIVNRVTARFGLSASQLIRLEAEEEKLAHLPLAKTVSVEELLQYVELQDPVTRTQLRAMAAKTVCPPHKVELEALLEKQAYKEQVLAKRLTMLELLEKYPACEMKFSEFIALLPSIRPRYYSISSSPRVDEKQASITVSVVSGPAWSGYGEYKGIASNYLAELQEGDTITCFISTDQSEFTLPKDPETPLIMVGPGTGVAPFRGFVQARKQLKEQGQSLGEAHLYFGCRSPHEDYLYQEELENAQSEGIITLHTAFSRMPNQPKTYVQHVMEQDGKKLIELLDQGAHFYICGDGSQMAPAVEATLMKSYADVHQVSYADARLWLQQLEEKGRYAKDVWAG

SEQ ID NO: 749 - DNA, 3147 bp, synthetic construct
  misc_feature 1..3147: note = Variant of cytochrome P450
  source 1..3147: mol_type = other DNA
atgacaattaaggaaatgcctcagcctaagacgtttggagaacttaaaaatttaccgttattaaacacagataaaccggttcaagctttgatgcgtattgcggatgaattaggagaaatctttaaattcgaggcgcctggtagcgtaacgcgctttttatcaagtcagcgtctaattaaagaagcatgcgatgaaagtcgctttgataaaaacttaagtcaaggccttaaatttgcacgtgattttcttggagacgggttatttacaagctggacgcatgaaccgaattggaaaaaagcgcataatatcttaggcccaagctttagtcagctggcaatgggccgttatcatgcgatgatggtcgatatcgccgtgcagcttgttcaaaagtgggagcgtctaaatgcagatgagcatattgaagtatcggaagacatgacacgtttaacgctggatacaattggtctttgcggcttcaactatcgctttaacagcttttaccgagatcagccgcatccatttattgtgagtgttgagggtgcactggatgaagtaatgaacaagctgcagcgagcaaatccagacgacccagcttatgatgaaaacaagcgccagtgtcaagaagacatcaaggtgatgaacgactatgtcgataaaattattgcagatcgcaaagcaaggggtgaacaaagccatgatttattaacgcagatgctaaacggaaaagatccagcaacgggtgagccgcttgatgacgggaacattcgttatcaaattctgacattcttaattgcgggacacgaaacaacaagtggtcttttatcatttgcgctgtatttcttagtgaaaaatccacatgtattacaaaaagtagcagaagaagcagcacgagttctagtagatcctgttccaagctacaaacaagtcaaacagcttaaatatgtcggcatggtcttaaacgaagcgctgcgcttatggccaactgctcctgcgttttccctatatgcaaaagaagatacggtacttggaggagaatatcctttaaccaaaggcgacgaagtaatggttctgattcctcagcttcaccgtgataaaacaatttggggagacgatgtggagtcgttccgtccagagcgttttgaaaatccaagtgcgattccgcagcatgcgtttaaaccgtttggaaacggtcagcgtgcgtgtatcggttggcagttcgctcttcatgaagcaacgctggtacttggtatgatgctaaaacactttgactttgaagatcatacaaactacgagctcgttattaaagaaaagttaacgttaaaacctgaaggctttgtggtaaaagcaaaatcgaaaggcattccgcttggcctgattccttcacctagcactgaacagtctgctaaaaaagtacgcaaaaaggcagaaaacgctcataatacgccgctgcttgtgctatacggttcaaatgcgggaacagctgaaggaacggcgcgtgatttagcagatattgcaatgagcaaaggatttgcaccgcaggtcgcaacgcttgattcacacgccggaaatcttccgcgcgaaggagctgtattaattgtaacggcgtcttataacggtcatccgcctgataacgcaaagcagtttgtcgactggttagaccaagcgtctgctgatgaagtaaaaggcgttcgctactccgtatttggatgcggcgataaaaactgggctgcgacgtatcaaaaagtgcctgcttttatcgatgaaacgcttgccgctaaaggggcagaaaacatcgctgacatgggtttcgctgatgcaagcgacgactttgaaggcgcgtatgaagaatggagtgatcatatgtggagtgacgtagcagcctactttaacctcgacattgaaaacagtgaagataataaatctactctttcacttcaatttgtcgacagcgccgcggatatgccgcttgcgaaaatgcacggtgcgttttcaacgaacgtcgtagcaagcaaagaacttcaacagccaggcagtgcacgaagcacgcgacatcttgaaattgaacttccaaaagaagcttcttatcaagaaggagatcatttaggtgttattcctcgcaactatgaaggaatagtaaaccgtgtaacagcaaggttcggcctaagcgcatcacagctgatccgtctggaagcagaagaagaaaaattagctcatttgccactcgctaaaacagtatccgtagaagagcttctgcaatacgtggagcttcaagatcctgttacgcgcacgcagcttcgcgcaatggctgctaaaacggtctgcccgccgcataaagtagagcttgaagccttgcttgaaaagcaagcctacaaagaacaagtgctggcaaaacgtttaacaatgcttgaactgcttgaaaaatacccggcgtgtgaaatgaaattcagcgaatttatcgcccttctgccaagcatacgcccgcgctattactcgatttcttcatcacctcgtgtcgatgaaaaacaagcaagcatcacggtcagcgttgtctcaggaccagcgtggagcggatatggagaatataaaggaattgcgtcgaactatcttgccgagctgcaagaaggagatacgattacgtgctttatttccacagatcagtcagaatttacgctgccaaaagaccctctggtgccgcttatcatggtcggaccgggaacaggcgtcgcgccgtttagaggctttgtgcaggcgcgcaaacagctaaaagaacaaggacagtcacttggagaagcacatttatacttcggctgccgttcacctcatgaagactatctgtatcaagaagagcttgaaaacgcccaaagcgaaggcatcattacgcttcataccgctttttctcgcatgccaaatcagccgaaaacatacgttcagcacgtaatggaacaagacggcaagaaattgattgaacttcttgatcaaggagcgcacttctatatctgcggagacggaagccaaatggcacctgccgttgaagcaacgcttatgaaaagctatgctgacgttcaccaagtgagtgaggcagacgctcgcttatggctgcagcagctagaagaaaaaggccgatacgcaaaagacgtgtgggctggg

SEQ ID NO: 750 - protein, 1049 aa, synthetic construct
  REGION 1..1049: note = Variant of cytochrome P450
MTIKEMPQPKTFGELKNLPLLNTDKPVQALMRIADELGEIFKFEAPGSVTRFLSSQRLIKEACDESRFDKNLSQGLKFARDFLGDGLFTSWTHEPNWKKAHNILGPSFSQLAMGRYHAMMVDIAVQLVQKWERLNADEHIEVSEDMTRLTLDTIGLCGFNYRFNSFYRDQPHPFIVSVEGALDEVMNKLQRANPDDPAYDENKRQCQEDIKVMNDYVDKIIADRKARGEQSHDLLTQMLNGKDPATGEPLDDGNIRYQILTFLIAGHETTSGLLSFALYFLVKNPHVLQKVAEEAARVLVDPVPSYKQVKQLKYVGMVLNEALRLWPTAPAFSLYAKEDTVLGGEYPLTKGDEVMVLIPQLHRDKTIWGDDVESFRPERFENPSAIPQHAFKPFGNGQRACIGWQFALHEATLVLGMMLKHFDFEDHTNYELVIKEKLTLKPEGFVVKAKSKGIPLGLIPSPSTEQSAKKVRKKAENAHNTPLLVLYGSNAGTAEGTARDLADIAMSKGFAPQVATLDSHAGNLPREGAVLIVTASYNGHPPDNAKQFVDWLDQASADEVKGVRYSVFGCGDKNWAATYQKVPAFIDETLAAKGAENIADMGFADASDDFEGAYEEWSDHMWSDVAAYFNLDIENSEDNKSTLSLQFVDSAADMPLAKMHGAFSTNVVASKELQQPGSARSTRHLEIELPKEASYQEGDHLGVIPRNYEGIVNRVTARFGLSASQLIRLEAEEEKLAHLPLAKTVSVEELLQYVELQDPVTRTQLRAMAAKTVCPPHKVELEALLEKQAYKEQVLAKRLTMLELLEKYPACEMKFSEFIALLPSIRPRYYSISSSPRVDEKQASITVSVVSGPAWSGYGEYKGIASNYLAELQEGDTITCFISTDQSEFTLPKDPLVPLIMVGPGTGVAPFRGFVQARKQLKEQGQSLGEAHLYFGCRSPHEDYLYQEELENAQSEGIITLHTAFSRMPNQPKTYVQHVMEQDGKKLIELLDQGAHFYICGDGSQMAPAVEATLMKSYADVHQVSEADARLWLQQLEEKGRYAKDVWAG

SEQ ID NO: 751 - DNA, 3147 bp, synthetic construct
  misc_feature 1..3147: note = Variant of cytochrome P450
  source 1..3147: mol_type = other DNA
atgacaattaaggaaatgcctcagcctaagacgtttggagaacttaaaaatttaccgttattaaacacagataaaccggttcaagctttgatgcgtattgcggatgaattaggagaaatctttaaattcgaggcgcctggtagcgtaacgcgctttttatcaagtcagcgtctaattaaagaagcatgcgatgaaagccgctttgataaaaacttaagtcaaggccttaaatttgcacgtgattttcttggagacgggttatttacaagctggacgcatgaaccgaattggaaaaaagcgcataatatcttaggcccaagctttagtcagctggcaatgggccgttatcatgcgatgatggtcgatatcgccgtgcagcttgttcaaaagtgggagcgtctaaatgcagatgagcatattgaagtatcggaagacatgacacgtttaacgctggatacaattggtctttgcggcttcaactatcgctttaacagcttttaccgagatcagccgcatccatttattgtgagtgttgagggtgcactggatgaagtaatgaacaagctgcagcgagcaaatccagacgacccagcttatgatgaaaacaagcgccagtgtcaagaagacatcaaggtgatgaacgactatgtcgataaaattattgcagatcgcaaagcaaggggtgaacaaagccatgatttattaacgcagatgctaaacggaaaagatccagcaacgggtgagccgcttgatgacgggaacattcgttatcaaattctgacattcttaattgcgggacacgaaacaacaagtggtcttttatcatttgcgctgtatttcttagtgaaaaatccacatgtattacaaaaagtagcagaagaagcagcacgagttctagtagatcctgttccaagctacaaacaagtcaaacagcttaaatatgtcggcatggtcttaaacgaagcgctgcgcttatggccaactgctcctgcgttttccctatatgcaaaagaagatacggtacttggaggagaatatcctttaaccaaaggcgacgaagtaatggttctgattcctcagcttcaccgtgataaaacaatttggggagacgatgtggaggagttccgtccagagcgttttgaaaatccaagtgcgattccgcagcatgcgtttaaaccgtttggaaacggtcagcgtgcgtgtatcggttggcagttcgctcttcatgaagcaacgctggtacttggtatgatgctaaaacactttgactttgaagatcatacaaactacgagctcgttattaaagaaaagttaacgttaaaacctgaaggctttgtggtaaaagcaaaatcgaaaggcattccgcttggcctgattccttcacctagcactgaacagtctgctaaaaaagtacgcaaaaaggcagaaaacgctcataatacgccgctgcttgtgctatacggttcaaatgcgggaacagctgaaggaacggcgcgtgatttagcagatattgcaatgagcaaaggatttgcaccgcaggtcgcaacgcttgattcacacgccggaaatcttccgcgcgaaggagctgtattaattgtaacggcgtcttataacggtcatccgcctgataacgcaaagcagtttgtcgactggttagaccaagcgtctgctgatgaagtaaaaggcgttcgctactccgtatttggatgcggcgataaaaactgggctgcgacgtatcaaaaagtgcctgcttttatcgatgaaacgcttgccgctaaaggggcagaaaacatcgctgaccgcggtgaagcagatgcaagcgacgactttgaaggcgcgtatgaagaatggagtgatcatatgtggagtgacgtagcagcctactttaacctcgacattgaaaacagtgaagataataaatctactctttcacttcaatttgtcgacagcgccgcggatatgccgcttgcgaaaatgcacggtgcgttttcaacgaacgtcgtagcaagcaaagaacttcaacagccaggcagtgcacgaagcacgcgacatcttgaaattgaacttccaaaagaagcttcttatcaagaaggagatcatttaggtgttattcctcgcaactatgaaggaatagtaaaccgtgtaacagcaaggttcggcctaagcgcatcacagctgatccgtctggaagcagaagaagaaaaattagctcatttgccactcgctaaaacagtatccgtagaagagcttctgcaatacgtggagcttcaagatcctgttacgcgcacgcagcttcgcgcaatggctgctaaaacggtctgcccgccgcataaagtagagcttgaagccttgcttgaaaagcaagcctacaaagaacaagtgctggcaaaacgtttaacaatgcttgaactgcttgaaaaatacccggcgtgtgaaatgaaattcagcgaatttatcgcccttctgccaagcatacgcccgcgctattactcgatttcttcatcacctcgtgtcgatgaaaaacaagcaagcatcacggtcagcgttgtctcaggaccagcgtggagcggatatggagaatataaaggaattgcgtcgaactatcttgccgagctgcaagaaggagatacgattacgtgctttatttccacagatcagtcagaatttacgctgccaaaagaccctgaagtgccgcttatcatggtcggaccgggaacaggcgtcgcgccgtttagaggctttgtgcaggcgcgcaaacagctaaaagaacaaggacagtcacttggagaagcacatttatacttcggctgccgttcacctcatgaagactatctgtatcaagaagagcttgaaaacgcccaaagcgaaggcatcattacgcttcataccgctttttctcgcatgccaaatcagccgaaaacatacgttcagcacgtaatggaacaagacggcaagaaattgattgaacttcttgatcaaggagcgcacttctatatttgcggagacggaagccaaatggcacctgccgttgaagcaacgcttatgaaaagctatgctgacgttcaccaagtgagtgaggcagacgctcgcttatggctgcagcagctagaagaaaaaggccgatacgcaaaagacgtgtgggctggg

SEQ ID NO: 752 - protein, 1049 aa, synthetic construct
  REGION 1..1049: note = Variant of cytochrome P450
MTIKEMPQPKTFGELKNLPLLNTDKPVQALMRIADELGEIFKFEAPGSVTRFLSSQRLIKEACDESRFDKNLSQGLKFARDFLGDGLFTSWTHEPNWKKAHNILGPSFSQLAMGRYHAMMVDIAVQLVQKWERLNADEHIEVSEDMTRLTLDTIGLCGFNYRFNSFYRDQPHPFIVSVEGALDEVMNKLQRANPDDPAYDENKRQCQEDIKVMNDYVDKIIADRKARGEQSHDLLTQMLNGKDPATGEPLDDGNIRYQILTFLIAGHETTSGLLSFALYFLVKNPHVLQKVAEEAARVLVDPVPSYKQVKQLKYVGMVLNEALRLWPTAPAFSLYAKEDTVLGGEYPLTKGDEVMVLIPQLHRDKTIWGDDVEEFRPERFENPSAIPQHAFKPFGNGQRACIGWQFALHEATLVLGMMLKHFDFEDHTNYELVIKEKLTLKPEGFVVKAKSKGIPLGLIPSPSTEQSAKKVRKKAENAHNTPLLVLYGSNAGTAEGTARDLADIAMSKGFAPQVATLDSHAGNLPREGAVLIVTASYNGHPPDNAKQFVDWLDQASADEVKGVRYSVFGCGDKNWAATYQKVPAFIDETLAAKGAENIADRGEADASDDFEGAYEEWSDHMWSDVAAYFNLDIENSEDNKSTLSLQFVDSAADMPLAKMHGAFSTNVVASKELQQPGSARSTRHLEIELPKEASYQEGDHLGVIPRNYEGIVNRVTARFGLSASQLIRLEAEEEKLAHLPLAKTVSVEELLQYVELQDPVTRTQLRAMAAKTVCPPHKVELEALLEKQAYKEQVLAKRLTMLELLEKYPACEMKFSEFIALLPSIRPRYYSISSSPRVDEKQASITVSVVSGPAWSGYGEYKGIASNYLAELQEGDTITCFISTDQSEFTLPKDPEVPLIMVGPGTGVAPFRGFVQARKQLKEQGQSLGEAHLYFGCRSPHEDYLYQEELENAQSEGIITLHTAFSRMPNQPKTYVQHVMEQDGKKLIELLDQGAHFYICGDGSQMAPAVEATLMKSYADVHQVSEADARLWLQQLEEKGRYAKDVWAG

SEQ ID NO: 753 - DNA, 3147 bp, synthetic construct
  misc_feature 1..3147: note = Variant of cytochrome P450
  source 1..3147: mol_type = other DNA
atgacaattaaggaaatgcctcagcctaagacgtttggagaacttaaaaatttaccgttattaaacacagataaaccggttcaagctttgatgcgtattgcggatgaattaggagaaatctttaaattcgaggcgcctggtagcgtaacgcgctttttatcaagtcagcgtctaattaaagaagcatgcgatgaaagtcgctttgataaaaacttaagtcaaggccttaaatttgcacgtgattttcttggagacgggttatttacaagctggacgcatgaaccgaattggaaaaaagcgcataatatcttaggcccaagctttagtcagcatgcaatgcgccgttatcatgcgatgatggtcgatatcgccgtgcagcttgttcaaaagtgggagcgtctaaatgcagatgagcatattgaagtatcggaagacatgacacgtttaacgctggatacaattggtctttgcggcttcaactatcgctttaacagcttttaccgagatcagccgcatccatttattgtgagtgttgagggtgcactggatgaagtaatgaacaagctgcagcgagcaaatccagacgacccagcttatgatgaaaacaagcgccagtgtcaagaagacatcaaggtgatgaacgactatgtcgataaaattattgcagatcgcaaagcaaggggtgaacaaagccatgatttattaacgcagatgctaaacggaaaagatccagcaacgggtgagccgcttgatgacgggaacattcgttatcaaattctgacattcttaattgcgggacacgaaacaacaagtggtcttttatcatttgcgctgtatttcttagtgaaaaatccacatgtattacaaaaagtagcagaagaagcagcacgagttctagtagatcctgttccaagctacaaacaagtcaaacagcttaaatatgtcggcatggtcttaaacgaagcgctgcgcttatggccaactgctcctgcgttttccctatatgcaaaagaagatacggtacttggaggagaatatcctttaaccaaaggcgacgaagtaatggttctgattcctcagcttcaccgtgataaaacaatttggggagacgatgtggagtcgttccgtccagagcgttttgaaaatccaagtgcgattccgcagcatgcgtttaaaccgtttggaaacggtcagcgtgcgtgtatcggttggcagttcgctcttcatgaagcaaccctggtacttggtatgatgctaaaacactttgactttgaagatcatacaaactacgagctcgttattaaagaaaagttaacgttaaaacctgaaggctttgtggtaaaagcaaaatcgaaaggcattccgcttggcctgattccttcacctagcactgaacagtctgctaaaaaagtacgcaaaaaggcagaaaacgctcataatacgccgctgcttgtgctatacggttcaaatgcgggaacagctgaaggaacggcgcgtgatttagcagatattgcaatgagcaaaggatttgcaccgcaggtcgcaacgcttgattcacacgccggaaatcttccgcgcgaaggagctgtattaattgtaacggcgtcttataacggtcatccgcctgataacgcaaagcagtttgtcgactggttagaccaagcgtctgctgatgaagtaaaaggcgttcgctactccgtatttggatgcggcgataaaaactgggctgcgacgtatcaaaaagtgcctgcttttatcgatgaaacgcttgccgctaaaggggcagaaaacatcgctgaccgcggtttcggtgatgcaagcgacgactttgaaggcgcgtatgaagaatggagtgatcatatgtggagtgacgtagcagcctactttaacctcgacattgaaaacagtgaagataataaatctactcttagccttcaatttgtcgacagcgccgcggatatgccgcttgcgaaaatgcacggtgcgttttcaacgaacgtcgtagcaagcaaagaacttcaacagccaggcagtgcacgaagcacgcgacatcttgaaattgaacttccaaaagaagcttcttatcaagaaggagatcatttaggtgttattcctcgcaactatgaaggaatagtaaaccgtgtaacagcaaggttcggcctaagcgcatcacagctgatccgtctggaagcagaagaagaaaaattagctcatttgccactcgctaaaacagtatccgtagaagagcttctgcaatacgtggagcttcaagatcctgttacgcgcacgcagcttcgcgcaatggctgctaaaacggtctgcccgccgcataaagtagagcttgaagccttgcttgaaaagcaagcctacaaagaacaagtgctggcaaaacgtttaacaatgcttgaactgcttgaaaaatacccggcgtgtgaaatgaaattcagcgaatttatcgcccttctgccaagcatacgcccgcgctattactcgatttcttcatcacctcgtgtcgatgaaaaacaagcaagcatcacggtcagcgttgtctcaggaccagcgtggagcggatatggagaatataaaggaattgcgtcgaactatcttgccgagctgcaagaaggagatacgattacgtgctttatttccacagatcagtcagaatttacgctgccaaaagaccctctggtgccgcttatcatggtcggaccgggaacaggcgtcgcgccgtttagaggctttgtgcaggcgcgcaaacagctaaaagaacaaggacagtcacttggagaagcacatttatacttcggctgccgttcacctcatgaagactatctgtatcaagaagagcttgaaaacgcccaaagcgaaggcatcattacgcttcataccgctttttctcgcatgccaaatcagccgaaaacatacgttcagcacgtaatggaacaagacggcaagaaattgattgaacttcttgatcaaggagcgcacttctatatctgcggagacggaagccaaatggcacctgccgttgaagcaacgcttatgaaaagctatgctgacgttcaccaagtgagtgaggcagacgctcgcttatggctgcagcagctagaagaaaaaggccgatacgcaaaagacgtgtgggctggg

SEQ ID NO: 754 - protein, 1049 aa, synthetic construct
  REGION 1..1049: note = Variant of cytochrome P450
MTIKEMPQPKTFGELKNLPLLNTDKPVQALMRIADELGEIFKFEAPGSVTRFLSSQRLIKEACDESRFDKNLSQGLKFARDFLGDGLFTSWTHEPNWKKAHNILGPSFSQHAMRRYHAMMVDIAVQLVQKWERLNADEHIEVSEDMTRLTLDTIGLCGFNYRFNSFYRDQPHPFIVSVEGALDEVMNKLQRANPDDPAYDENKRQCQEDIKVMNDYVDKIIADRKARGEQSHDLLTQMLNGKDPATGEPLDDGNIRYQILTFLIAGHETTSGLLSFALYFLVKNPHVLQKVAEEAARVLVDPVPSYKQVKQLKYVGMVLNEALRLWPTAPAFSLYAKEDTVLGGEYPLTKGDEVMVLIPQLHRDKTIWGDDVESFRPERFENPSAIPQHAFKPFGNGQRACIGWQFALHEATLVLGMMLKHFDFEDHTNYELVIKEKLTLKPEGFVVKAKSKGIPLGLIPSPSTEQSAKKVRKKAENAHNTPLLVLYGSNAGTAEGTARDLADIAMSKGFAPQVATLDSHAGNLPREGAVLIVTASYNGHPPDNAKQFVDWLDQASADEVKGVRYSVFGCGDKNWAATYQKVPAFIDETLAAKGAENIADRGFGDASDDFEGAYEEWSDHMWSDVAAYFNLDIENSEDNKSTLSLQFVDSAADMPLAKMHGAFSTNVVASKELQQPGSARSTRHLEIELPKEASYQEGDHLGVIPRNYEGIVNRVTARFGLSASQLIRLEAEEEKLAHLPLAKTVSVEELLQYVELQDPVTRTQLRAMAAKTVCPPHKVELEALLEKQAYKEQVLAKRLTMLELLEKYPACEMKFSEFIALLPSIRPRYYSISSSPRVDEKQASITVSVVSGPAWSGYGEYKGIASNYLAELQEGDTITCFISTDQSEFTLPKDPLVPLIMVGPGTGVAPFRGFVQARKQLKEQGQSLGEAHLYFGCRSPHEDYLYQEELENAQSEGIITLHTAFSRMPNQPKTYVQHVMEQDGKKLIELLDQGAHFYICGDGSQMAPAVEATLMKSYADVHQVSEADARLWLQQLEEKGRYAKDVWAG

SEQ ID NO: 755 - DNA, 3147 bp, synthetic construct
  misc_feature 1..3147: note = Variant of cytochrome P450
  source 1..3147: mol_type = other DNA
atgacaattaaggaaatgcctcagcctaagacgtttggagaacttaaaaatttaccgttattaaacacagataaaccggttcaagctttgatgcgtattgcggatgaattaggagaaatctttaaattcgaggcgcctggtagcgtaacgcgctttttatcaagtcagcgtctaattaaagaagcatgcgatgaaagtcgctttgataaaaacttaagtcaaggccttaaatttgcacgtgattttcttggagacgggttatttacaagctggacgcatgaaccgaattggaaaaaagcgcataatatcttaggcccaagctttagtcagctggcaatgcgccgttatcatgcgatgatggtcgatatcgccgtgcagcttgttcaaaagtgggagcgtctaaatgcagatgagcatattgaagtatcggaagacatgacacgtttaacgctggatacaattggtctttgcggcttcaactatcgctttaacagcttttaccgagatcagccgcatccatttattgtgagtgttgagggtgcactggatgaagtaatgaacaagctgcagcgagcaaatccagacgacccagcttatgatgaaaacaagcgccagtgtcaagaagacatcaaggtgatgaacgactatgtcgataaaattattgcagatcgcaaagcaaggggtgaacaaagccatgatttattaacgcagatgctaaacggaaaagatccagcaacgggtgagccgcttgatgacgggaacattcgttatcaaattctgacattcttaattgcgggacacgaaacaacaagtggtcttttatcatttgcgctgtatttcttagtgaaaaatccacatgtattacaaaaagtagcagaagaagcagcacgagttctagtagatcctgttccaagctacaaacaagtcaaacagcttaaatatgtcggcatggtcttaaacgaagcgctgcgcttatggccaactgctcctgcgttttccctatatgcaaaagaagatacggtacttggaggagaatatcctttaaccaaaggcgacgaagtaatggttctgattcctcagcttcaccgtgataaaacaatttggggagacgatgtggagtcgttccgtccagagcgttttgaaaatccaagtgcgattccgcagcatgcgtttaaaccgtttggaaacggtcagcgtgcgtgtatcggttggcagttcgctcttcatgaagcaacgctggtacttggtatgatgctaaaacactttgactttgaagatcatacaaactacgagctcgttattaaagaaaagttaacgttaaaacctgaaggctttgtggtaaaagcaaaatcgaaaggcattccgcttggcctgattccttcacctagcactgaacagtctgctaaaaaagtacgcaaaaaggcagaaaacgctcataatacgccgctgcttgtgctatacggttcaaatgcgggaacagctgaaggaacggcgcgtgatttagcagatattgcaatgagcaaaggatttgcaccgcaggtcgcaacgcttgattcacacgccggaaatcttccgcgcgaaggagctgtattaattgtaacggcgtcttataacggtcatccgcctgataacgcaaagcagtttgtcgactggttagaccaagcgtctgctgatgaagtaaaaggcgttcgctactccgtatttggatgcggcgataaaaactgggctgcgacgtatcaaaaagtgcctgcttttatcgatgaaacgcttgccgctaaaggggcagaaaacatcgctgaccgcggtttcggtgatgcaagcgacgactttgaaggcgcgtatgaagaatggagtgatcatatgtggaccgacgtagcagcctactttaacctcgacattgaaaacagtgaagataataaatctactctttcacttcaatttgtcgacagcgccgcggatatgccgcttgcgaaaatgcacggtgcgttttcaacgaacgtcgtagcaagcaaagaacttcaacagccaggcagtgcacgaagcacgcgacatcttgaaattgaacttccaaaagaagcttcttatcaagaaggagatcatttaggtgttattcctcgcaactatgaaggaatagtaaaccgtgtaacagcaaggttcggcctaagcgcatcacagctgatccgtctggaagcagaagaagaaaaattagctcatttgccactcgctaaaacagtatccgtagaagagcttctgcaatacgtggagcttcaagatcctgttacgcgcacgcagcttcgcgcaatggctgctaaaacggtctgcccgccgcataaagtagagcttgaagccttgcttgaaaagcaagcctacaaagaacaagtgctggcaaaacgtttaacaatgcttgaactgcttgaaaaatacccggcgtgtgaaatgaaattcagcgaatttatcgcccttctgccaagcatacgcccgcgctattactcgatttcttcatcacctcgtgtcgatgaaaaacaagcaagcatcacggtcagcgttgtctcaggagacgcgtggagcggatatggagaatataaaggaattgcgtcgaactatcttgccgagctgcaagaaggagatacgattacgtgctttatttccacagatcagtcagaatttacgctgccaaaagaccctgaagtgccgcttatcatggtcggaccgggaacaggcgtcgcgccgtttagaggctttgtgcaggcgcgcaaacagctaaaagaacaaggacagtcacttggagaagcacatttatacttcggctgccgttcacctcatgaagactatctgtatcaagaagagcttgaaaacgcccaaagcgaaggcatcattacgcttcataccgctttttctcgcatgccaaatcagccgaaaacatacgttcagcacgtaatggaacaagacggcaagaaattgattgaacttcttgatcaaggagcgcacttctatatctgcggagacggaagccaaatggcacctgccgttgaagcaacgcttatgaaaagctatgctgacgttcaccaagtgagtgaggcagacgctcgcttatggctgcagcagctagaagaaaaaggccgatacgcaaaagacgtgtgggctggg

SEQ ID NO: 756 - protein, 1049 aa, synthetic construct
  REGION 1..1049: note = Variant of cytochrome P450
MTIKEMPQPKTFGELKNLPLLNTDKPVQALMRIADELGEIFKFEAPGSVTRFLSSQRLIKEACDESRFDKNLSQGLKFARDFLGDGLFTSWTHEPNWKKAHNILGPSFSQLAMRRYHAMMVDIAVQLVQKWERLNADEHIEVSEDMTRLTLDTIGLCGFNYRFNSFYRDQPHPFIVSVEGALDEVMNKLQRANPDDPAYDENKRQCQEDIKVMNDYVDKIIADRKARGEQSHDLLTQMLNGKDPATGEPLDDGNIRYQILTFLIAGHETTSGLLSFALYFLVKNPHVLQKVAEEAARVLVDPVPSYKQVKQLKYVGMVLNEALRLWPTAPAFSLYAKEDTVLGGEYPLTKGDEVMVLIPQLHRDKTIWGDDVESFRPERFENPSAIPQHAFKPFGNGQRACIGWQFALHEATLVLGMMLKHFDFEDHTNYELVIKEKLTLKPEGFVVKAKSKGIPLGLIPSPSTEQSAKKVRKKAENAHNTPLLVLYGSNAGTAEGTARDLADIAMSKGFAPQVATLDSHAGNLPREGAVLIVTASYNGHPPDNAKQFVDWLDQASADEVKGVRYSVFGCGDKNWAATYQKVPAFIDETLAAKGAENIADRGFGDASDDFEGAYEEWSDHMWTDVAAYFNLDIENSEDNKSTLSLQFVDSAADMPLAKMHGAFSTNVVASKELQQPGSARSTRHLEIELPKEASYQEGDHLGVIPRNYEGIVNRVTARFGLSASQLIRLEAEEEKLAHLPLAKTVSVEELLQYVELQDPVTRTQLRAMAAKTVCPPHKVELEALLEKQAYKEQVLAKRLTMLELLEKYPACEMKFSEFIALLPSIRPRYYSISSSPRVDEKQASITVSVVSGDAWSGYGEYKGIASNYLAELQEGDTITCFISTDQSEFTLPKDPEVPLIMVGPGTGVAPFRGFVQARKQLKEQGQSLGEAHLYFGCRSPHEDYLYQEELENAQSEGIITLHTAFSRMPNQPKTYVQHVMEQDGKKLIELLDQGAHFYICGDGSQMAPAVEATLMKSYADVHQVSEADARLWLQQLEEKGRYAKDVWAG

SEQ ID NO: 757 - DNA, 3147 bp, synthetic construct
  misc_feature 1..3147: note = Variant of cytochrome P450
  source 1..3147: mol_type = other DNA
atgacaattaaggaaatgcctcagcctaagacgtttggagaacttaaaaatttaccgttattaaacacagataaaccggttcaagctttgatgcgtattgcggatgaattaggagaaatctttaaattcgaggcgcctggtagcgtaacgcgctttttatcaagtcagcgtctaattaaagaagcatgcgatgaacgtcgctttgataaaaacttaagtcaaggccttaaatttgcacgtgattttcttggagacgggttatttacaagctggacgcatgaaccgaattggaaaaaagcgcataatatcttaggcccaagctttagtcagcatgcaatgggccgttatcatgcgatgatggtcgatatcgccgtgcagcttgttcaaaagtgggagcgtctaaatgcagatgagcatattgaagtatcggaagacatgacacgtttaacgctggatacaattggtctttgcggcttcaactatcgctttaacagcttttaccgagatcagccgcatccatttattgtgagtgttgagggtgcactggatgaagtaatgaacaagctgcagcgagcaaatccagacgacccagcttatgatgaaaacaagcgccagtgtcaagaagacatcaaggtgatgaacgactatgtcgataaaattattgcagatcgcaaagcaaggggtgaacaaagccatgatttattaacgcagatgctaaacggaaaagatccagcaacgggtgagccgcttgatgacgggaacattcgttatcaaattctgacattcttaattgcgggacacgaaacaacaagtggtcttttatcatttgcgctgtatttcttagtgaaaaatccacatgtattacaaaaagtagcagaagaagcagcacgagttctagtagatcctgttccaagctacaaacaagtcaaacagcttaaatatgtcggcatggtcttaaacgaagcgctgcgcttatggccaactgctcctgcgttttccctatatgcaaaagaagatacggtacttggaggagaatatcctttaaccaaaggcgacgaagtaatggttctgattcctcagcttcaccgtgataaaacaatttggggagacgatgtggaggagttccgtccagagcgttttgaaaatccaagtgcgattccgcagcatgcgtttaaaccgtttggaaacggtcagcgtgcgtgtatcggttggcagttcgctcttcatgaagcaacgctggtacttggtatgatgctaaaacactttgactttgaagatcatacaaactacgagctcgttattaaagaaaagttaacgttaaaacctgaaggctttgtggtaaaagcaaaatcgaaaggcattccgcttggcctgattccttcacctagcactgaacagtctgctaaaaaagtacgcaaaaaggcagaaaacgctcataatacgccgctgcttgtgctatacggttcaaatgcgggaacagctgaaggaacggcgcgtgatttagcagatattgcaatgagcaaaggatttgcaccgcaggtcgcaacgcttgattcacacgccggaaatcttccgcgcgaaggagctgtattaattgtaacggcgtcttataacggtcatccgcctgataacgcaaagcagtttgtcgactggttagaccaagcgtctgctgatgaagtaaaaggcgttcgctactccgtatttggatgcggcgataaaaactgggctgcgacgtatcaaaaagtgcctgcttttatcgatgaaacgcttgccgctaaaggggcagaaaacatcgctgacatgggtgagggtgatgcaagcgacgactttgaaggcgcgtatgaagaatggagtgatcatatgtggagtgacgtagcagcctactttaacctcgacattgaaaacagtgaagataataaatctactctttcacttcaatttgtcgacagcgccgcggatatgccgcttgcgaaaatgcacggtgcgttttcaacgaacgtcgtagcaagcaaagaacttcaacagccaggcagtgcacgaagcacgcgacatcttgaaattgaacttccaaaagaagcttcttatcaagaaggagatcatttaggtgttattcctcgcaactatgaaggaatagtaaaccgtgtaacagcaaggttcggcctaagcgcatcacagcagatccgtctggaagcagaagaagaaaaattagctcatttgccactcgctaaaacagtatccgtagaagagcttctgcaatacgtggagcttcaagatcctgttacgcgcacgcagcttcgcgcaatggctgctaaaacggtctgcccgccgcataaagtagagcttgaagccttgcttgaaaagcaagcctacaaagaacaagtgctggcaaaacgtttaacaatgcttgaactgcttgaaaaatacccggcgtgtgaaatgaaattcagcgaatttatcgcccttctgccaagcatacgcccgcgctattactcgatttcttcatcacctcgtgtcgatgaaaaacaagcaagcatcacggtcagcgttgtctcaggagacgcgtggagcggatatggagaatataaaggaattgcgtcgaactatcttgccgagctgcaagaaggagatacgattacgtgctttatttccacagatcagtcagaatttacgctgccaaaagaccctgaaacgccgcttatcatggtcggaccgggaacaggcgtcgcgccgtttagaggctttgtgcaggcgcgcaaacagctaaaagaacaaggacagtcacttggagaagcacatttatacttcggctgccgttcacctcatgaagactatctgtatcaagaagagcttgaaaacgcccaaagcgaaggcatcattacgcttcataccgctttttctcgcatgccaaatcagccgaaaacatacgttcagcacgtaatggaacaagacggcaagaaattgattgaacttcttgatcaaggagcgcacttctatatctgcggagacggaagccaaatggcacctgccgttgaagcaacgcttatgaaaagctatgctgacgttcaccaagtgagtgaggcagacgctcgcttatggctgcagcagctagaagaaaaaggccgatacgcaaaagacgtgtgggctggg

SEQ ID NO: 758 - protein, 1049 aa, synthetic construct
  REGION 1..1049: note = Variant of cytochrome P450
MTIKEMPQPKTFGELKNLPLLNTDKPVQALMRIADELGEIFKFEAPGSVTRFLSSQRLIKEACDERRFDKNLSQGLKFARDFLGDGLFTSWTHEPNWKKAHNILGPSFSQHAMGRYHAMMVDIAVQLVQKWERLNADEHIEVSEDMTRLTLDTIGLCGFNYRFNSFYRDQPHPFIVSVEGALDEVMNKLQRANPDDPAYDENKRQCQEDIKVMNDYVDKIIADRKARGEQSHDLLTQMLNGKDPATGEPLDDGNIRYQILTFLIAGHETTSGLLSFALYFLVKNPHVLQKVAEEAARVLVDPVPSYKQVKQLKYVGMVLNEALRLWPTAPAFSLYAKEDTVLGGEYPLTKGDEVMVLIPQLHRDKTIWGDDVEEFRPERFENPSAIPQHAFKPFGNGQRACIGWQFALHEATLVLGMMLKHFDFEDHTNYELVIKEKLTLKPEGFVVKAKSKGIPLGLIPSPSTEQSAKKVRKKAENAHNTPLLVLYGSNAGTAEGTARDLADIAMSKGFAPQVATLDSHAGNLPREGAVLIVTASYNGHPPDNAKQFVDWLDQASADEVKGVRYSVFGCGDKNWAATYQKVPAFIDETLAAKGAENIADMGEGDASDDFEGAYEEWSDHMWSDVAAYFNLDIENSEDNKSTLSLQFVDSAADMPLAKMHGAFSTNVVASKELQQPGSARSTRHLEIELPKEASYQEGDHLGVIPRNYEGIVNRVTARFGLSASQQIRLEAEEEKLAHLPLAKTVSVEELLQYVELQDPVTRTQLRAMAAKTVCPPHKVELEALLEKQAYKEQVLAKRLTMLELLEKYPACEMKFSEFIALLPSIRPRYYSISSSPRVDEKQASITVSVVSGDAWSGYGEYKGIASNYLAELQEGDTITCFISTDQSEFTLPKDPETPLIMVGPGTGVAPFRGFVQARKQLKEQGQSLGEAHLYFGCRSPHEDYLYQEELENAQSEGIITLHTAFSRMPNQPKTYVQHVMEQDGKKLIELLDQGAHFYICGDGSQMAPAVEATLMKSYADVHQVSEADARLWLQQLEEKGRYAKDVWAG

SEQ ID NO: 759 - DNA, 3147 bp, synthetic construct
  misc_feature 1..3147: note = Variant of cytochrome P450
  source 1..3147: mol_type = other DNA
atgacaattaaggaaatgcctcagcctaagacgtttggagaacttaaaaatttaccgttattaaacacagataaaccggttcaagctttgatgcgtattgcggatgaattaggagaaatctttaaattcgaggcgcctggtagcgtaacgcgctttttatcaagtcagcgtctaattaaagaagcatgcgatgaaagtcgctttgataaaaacttaagtcaaggccttaaatttgcacgtgattttcttggagacgggttatttacaagctggacgcatgaaccgaattggaaaaaagcgcataatatcttaggcccaagctttagtcagctggcaatgggccgttatcatgcgatgatggtcgatatcgccgtgcagcttgttcaaaagtgggagcgtctaaatgcagatgagcatattgaagtatcggaagacatgacacgtttaacgctggatacaattggtctttgcggcttcaactatcgctttaacagcttttaccgagatcagccgcatccatttattgtgagtgttgagggtgcactggatgaagtaatgaacaagctgcagcgagcaaatccagacgacccagcttatgatgaaaacaagcgccagtgtcaagaagacatcaaggtgatgaacgactatgtcgataaaattattgcagatcgcaaagcaaggggtgaacaaagccatgatttattaacgcagatgctaaacggaaaagatccagcaacgggtgagccgcttgatgacgggaacattcgttatcaaattctgacattcttaattgcgggacacgaaacaacaagtggtcttttatcatttgcgctgtatttcttagtgaaaaatccacatgtattacaaaaagtagcagaagaagcagcacgagttctagtagatcctgttccaagctacaaacaagtcaaacagcttaaatatgtcggcatggtcttaaacgaagcgctgcgcttatggccaactgctcctgcgttttccctatatgcaaaagaagatacggtacttggaggagaatatcctttaaccaaaggcgacgaagtaatggttctgattcctcagcttcaccgtgataaaacaatttggggagacgatgtggagtcgttccgtccagagcgttttgaaaatccaagtgcgattccgcagcatgcgtttaaaccgtttggaaacggtcagcgtgcgtgtatcggttggcagttcgctcttcatgaagcaacgctggtacttggtatgatgctaaaacactttgactttgaagatcatacaaactacgagctcgttattaaagaaaagttaacgttaaaacctgaaggctttgtggtaaaagcaaaatcgaaaggcattccgcttggcctgattccttcacctagcactgaacagtctgctaaaaaagtacgcaaaaaggcagaaaacgctcataatacgccgctgcttgtgctatacggttcaaatgcgggaacagctgaaggaacggcgcgtgatttagcagatattgcaatgagcaaaggatttgcaccgcaggtcgcaacgcttgattcacacgccggaaatcttccgcgcgaaggagctgtattaattgtaacggcgtcttataacggtcatccgcctgataacgcaaagcagtttgtcgactggttagaccaagcgtctgctgatgaagtaaaaggcgttcgctactccgtatttggatgcggcgataaaaactgggctgcgacgtatcaaaaagtgcctgcttttatcgatgaaacgcttgccgctaaaggggcagaaaacatcgctgaccgcggtgaggctgatgcaagcgacgactttgaaggcgcgtatgaagaatggagtgatcatatgtggagtgacgtagcagcctactttaacctcgacattgaaaacagtgaagataataaatctactctttcacttcaatttgtcgacagcgccgcggatatgccgcttgcgaaaatgcacggtgcgttttcaacgaacgtcgtagcaagcaaagaacttcaacagccaggcagtgcacgaagcacgcgacatcttgaaattgaacttccaaaagaagcttcttatcaagaaggagatcatttaggtgttattcctcgcaactatgaaggaatagtaaaccgtgtaacagcaaggttcggcctaagcgcatcacagcaaatccgtctggaagcagaagaagaaaaattagctcatttgccactcgctaaaacagtatccgtagaagagcttctgcaatacgtggagcttcaagatcctgttacgcgcacgcagcttcgcgcaatggctgctaaaacggtctgcccgccgcataaagtagagcttgaagccttgcttgaaaagcaagcctacaaagaacaagtgctggcaaaacgtttaacaatgcttgaactgcttgaaaaatacccggcgtgtgaaatgaaattcagcgaatttatcgcccttctgccaagcatacgcccgcgctattactcgatttcttcatcacctcgtgtcgatgaaaaacaagcaagcatcacggtcagcgttgtctcaggagacgcgtggagcggatatggagaatataaaggaattgcgtcgaactatcttgccgagctgcaagaaggagatacgattacgtgctttatttccacagatcagtcagaatttacgctgccaaaagaccctgaagtgccgcttatcatggtcggaccgggaacaggcgtcgcgccgtttagaggctttgtgcaggcgcgcaaacagctaaaagaacaaggacagtcacttggagaagcacatttatacttcggctgccgttcacctcatgaagactatctgtatcaagaagagcttgaaaacgcccaaagcgaaggcatcattacgcttcataccgctttttctcgcatgccaaatcagccgaaaacatacgttcagcacgtaatggaacaagacggcaagaaattgattgaacttcttgatcaaggagcgcacttctattgttgcggagacggaagccaaatggcacctgccgttgaagcaacgcttatgaaaagctatgctgacgttcaccaagtgagttatgcagacgctcgcttatggctgcagcagctagaagaaaaaggccgatacgcaaaagacgtgtgggctggg

SEQ ID NO: 760 - protein, 1049 aa, synthetic construct
  REGION 1..1049: note = Variant of cytochrome P450
MTIKEMPQPKTFGELKNLPLLNTDKPVQALMRIADELGEIFKFEAPGSVTRFLSSQRLIKEACDESRFDKNLSQGLKFARDFLGDGLFTSWTHEPNWKKAHNILGPSFSQLAMGRYHAMMVDIAVQLVQKWERLNADEHIEVSEDMTRLTLDTIGLCGFNYRFNSFYRDQPHPFIVSVEGALDEVMNKLQRANPDDPAYDENKRQCQEDIKVMNDYVDKIIADRKARGEQSHDLLTQMLNGKDPATGEPLDDGNIRYQILTFLIAGHETTSGLLSFALYFLVKNPHVLQKVAEEAARVLVDPVPSYKQVKQLKYVGMVLNEALRLWPTAPAFSLYAKEDTVLGGEYPLTKGDEVMVLIPQLHRDKTIWGDDVESFRPERFENPSAIPQHAFKPFGNGQRACIGWQFALHEATLVLGMMLKHFDFEDHTNYELVIKEKLTLKPEGFVVKAKSKGIPLGLIPSPSTEQSAKKVRKKAENAHNTPLLVLYGSNAGTAEGTARDLADIAMSKGFAPQVATLDSHAGNLPREGAVLIVTASYNGHPPDNAKQFVDWLDQASADEVKGVRYSVFGCGDKNWAATYQKVPAFIDETLAAKGAENIADRGEADASDDFEGAYEEWSDHMWSDVAAYFNLDIENSEDNKSTLSLQFVDSAADMPLAKMHGAFSTNVVASKELQQPGSARSTRHLEIELPKEASYQEGDHLGVIPRNYEGIVNRVTARFGLSASQQIRLEAEEEKLAHLPLAKTVSVEELLQYVELQDPVTRTQLRAMAAKTVCPPHKVELEALLEKQAYKEQVLAKRLTMLELLEKYPACEMKFSEFIALLPSIRPRYYSISSSPRVDEKQASITVSVVSGDAWSGYGEYKGIASNYLAELQEGDTITCFISTDQSEFTLPKDPEVPLIMVGPGTGVAPFRGFVQARKQLKEQGQSLGEAHLYFGCRSPHEDYLYQEELENAQSEGIITLHTAFSRMPNQPKTYVQHVMEQDGKKLIELLDQGAHFYCCGDGSQMAPAVEATLMKSYADVHQVSYADARLWLQQLEEKGRYAKDVWAG

SEQ ID NO: 761 - DNA, 3147 bp, synthetic construct
  misc_feature 1..3147: note = Variant of cytochrome P450
  source 1..3147: mol_type = other DNA
atgacaattaaggaaatgcctcagcctaagacgtttggagaacttaaaaatttaccgttattaaacacagataaaccggttcaagctttgatgcgtattgcggatgaattaggagaaatctttaaattcgaggcgcctggtagcgtaacgcgctttttatcaagtcagcgtctaattaaagaagcatgcgatgaaagtcgctttgataaaaacttaagtcaaggccttaaatttgcacgtgattttcttggagacgggttatttacaagctggacgcatgaaccgaattggaaaaaagcgcataatatcttaggcccaagctttagtcagctggcaatgggccgttatcatgcgatgatggtcgatatcgccgtgcagcttgttcaaaagtgggagcgtctaaatgcagatgagcatattgaagtatcggaagacatgacacgtttaacgctggatacaattggtctttgcggcttcaactatcgctttaacagcttttaccgagatcagccgcatccatttattgtgagtgttgagggtgcactggatgaagtaatgaacaagctgcagcgagcaaatccagacgacccagcttatgatgaaaacaagcgccagtgtcaagaagacatcaaggtgatgaacgactatgtcgataaaattattgcagatcgcaaagcaaggggtgaacaaagccatgatttattaacgcagatgctaaacggaaaagatccagcaacgggtgagccgcttgatgacgggaacattcgttatcaaattctgacattcttaattgcgggacacgaaacaacaagtggtcttttatcatttgcgctgtatttcttagtgaaaaatccacatgtattacaaaaagtagcagaagaagcagcacgagttctagtagatcctgttccaagctacaaacaagtcaaacagcttaaatatgtcggcatggtcttaaacgaagcgctgcgcttatggccaactgctcctgcgttttccctatatgcaaaagaagatacggtacttggaggagaatatcctttaaccaaaggcgacgaagtaatggttctgattcctcagcttcaccgtgataaaacaatttggggagacgatgtggaggagttccgtccagagcgttttgaaaatccaagtgcgattccgcagcatgcgtttaaaccgtttggaaacggtcagcgtgcgtgtatcggttggcagttcgctcttcatgaagcaacgctggtacttggtatgatgctaaaacactttgactttgaagatcatacaaactacgagctcgttattaaagaaaagttaacgttaaaacctgaaggctttgtggtaaaagcaaaatcgaaaggcattccgcttggcctgattccttcacctagcactgaacagtctgctaaaaaagtacgcaaaaaggcagaaaacgctcataatacgccgctgcttgtgctatacggttcaaatgcgggaacagctgaaggaacggcgcgtgatttagcagatattgcaatgagcaaaggatttgcaccgcaggtcgcaacgcttgattcacacgccggaaatcttccgcgcgaaggagctgtattaattgtaacggcgtcttataacggtcatccgcctgataacgcaaagcagtttgtcgactggttagaccaagcgtctgctgatgaagtaaaaggcgttcgctactccgtatttggatgcggcgataaaaactgggctgcgacgtatcaaaaagtgcctgcttttatcgatgaaacgcttgccgctaaaggggcagaaaacatcgctgacatgggtgagggtgatgcaagcgacgactttgaaggcgcgtatgaagaatggagtgatcatatgtggagtgacgtagcagcctactttaacctcgacattgaaaacagtgaagataataaatctactctttcacttcaatttgtcgacagcgccgcggatatgccgcttgcgaaaatgcacggtgcgttttcaacgaacgtcgtagcaagcaaagaacttcaacagccaggcagtgcacgaagcacgcgacatcttgaaattgaacttccaaaagaagcttcttatcaagaaggagatcatttaggtgttattcctcgcaactatgaaggaatagtaaaccgtgtaacagcaaggttcggcctaagcgcatcacagctgatccgtctggaagcagaagaagaaaaattagctcatttgccactcgctaaaacagtatccgtagaagagcttctgcaatacgtggagcttcaagatcctgttacgcgcacgcagcttcgcgcaatggctgctaaaacggtctgcccgccgcataaagtagagcttgaagccttgcttgaaaagcaagcctacaaagaacaagtgctggcaaaacgtttaacaatgcttgaactgcttgaaaaatacccggcgtgtgaaatgaaattcagcgaatttatcgcccttctgccaagcatacgcccgcgctattactcgatttcttcatcacctcgtgtcgatgaaaaacaagcaagcatcacggtcagcgttgtctcaggaccggcgtggagcggatatggagaatataaaggaattgcgtcgaactatcttgccgagctgcaagaaggagatacgattacgtgctttatttccacagatcagtcagaatttacgctgccaaaagaccctgaagtgccgcttatcatggtcggaccgggaacaggcgtcgcgccgtttagaggctttgtgcaggcgcgcaaacagctaaaagaacaaggacagtcacttggagaagcacatttatacttcggctgccgttcacctcatgaagactatctgtatcaagaagagcttgaaaacgcccaaagcgaaggcatcattacgcttcataccgctttttctcgcatgccaaatcagccgaaaacatacgttcagcacgtaatggaacaagacggcaagaaattgattgaacttcttgatcaaggagcgcacttctatatttgcggagacggaagccaaatggcacctgccgttgaagcaacgcttatgaaaagctatgctgacgttcaccaagtgagtgaagcagacgctcgcttatggctgcagcagctagaagaaaaaggccgatacgcaaaagacgtgtgggctggg

SEQ ID NO: 762 - protein, 1049 aa, synthetic construct
  REGION 1..1049: note = Variant of cytochrome P450
MTIKEMPQPKTFGELKNLPLLNTDKPVQALMRIADELGEIFKFEAPGSVTRFLSSQRLIKEACDESRFDKNLSQGLKFARDFLGDGLFTSWTHEPNWKKAHNILGPSFSQLAMGRYHAMMVDIAVQLVQKWERLNADEHIEVSEDMTRLTLDTIGLCGFNYRFNSFYRDQPHPFIVSVEGALDEVMNKLQRANPDDPAYDENKRQCQEDIKVMNDYVDKIIADRKARGEQSHDLLTQMLNGKDPATGEPLDDGNIRYQILTFLIAGHETTSGLLSFALYFLVKNPHVLQKVAEEAARVLVDPVPSYKQVKQLKYVGMVLNEALRLWPTAPAFSLYAKEDTVLGGEYPLTKGDEVMVLIPQLHRDKTIWGDDVEEFRPERFENPSAIPQHAFKPFGNGQRACIGWQFALHEATLVLGMMLKHFDFEDHTNYELVIKEKLTLKPEGFVVKAKSKGIPLGLIPSPSTEQSAKKVRKKAENAHNTPLLVLYGSNAGTAEGTARDLADIAMSKGFAPQVATLDSHAGNLPREGAVLIVTASYNGHPPDNAKQFVDWLDQASADEVKGVRYSVFGCGDKNWAATYQKVPAFIDETLAAKGAENIADMGEGDASDDFEGAYEEWSDHMWSDVAAYFNLDIENSEDNKSTLSLQFVDSAADMPLAKMHGAFSTNVVASKELQQPGSARSTRHLEIELPKEASYQEGDHLGVIPRNYEGIVNRVTARFGLSASQLIRLEAEEEKLAHLPLAKTVSVEELLQYVELQDPVTRTQLRAMAAKTVCPPHKVELEALLEKQAYKEQVLAKRLTMLELLEKYPACEMKFSEFIALLPSIRPRYYSISSSPRVDEKQASITVSVVSGPAWSGYGEYKGIASNYLAELQEGDTITCFISTDQSEFTLPKDPEVPLIMVGPGTGVAPFRGFVQARKQLKEQGQSLGEAHLYFGCRSPHEDYLYQEELENAQSEGIITLHTAFSRMPNQPKTYVQHVMEQDGKKLIELLDQGAHFYICGDGSQMAPAVEATLMKSYADVHQVSEADARLWLQQLEEKGRYAKDVWAG

SEQ ID NO: 763 - DNA, 3147 bp, synthetic construct
  misc_feature 1..3147: note = Variant of cytochrome P450
  source 1..3147: mol_type = other DNA
atgacaattaaggaaatgcctcagcctaagacgtttggagaacttaaaaatttaccgttattaaacacagataaaccggttcaagctttgatgcgtattgcggatgaattaggagaaatctttaaattcgaggcgcctggtagcgtaacgcgctttttatcaagtcagcgtctaattaaagaagcatgcgatgaaagccgctttgataaaaacttaagtcaaggccttaaatttgcacgtgattttcttggagacgggttatttacaagctggacgcatgaaccgaattggaaaaaagcgcataatatcttaggcccaagctttagtcagcatgcaatgggccgttatcatgcgatgatggtcgatatcgccgtgcagcttgttcaaaagtgggagcgtctaaatgcagatgagcatattgaagtatcggaagacatgacacgtttaacgctggatacaattggtctttgcggcttcaactatcgctttaacagcttttaccgagatcagccgcatccatttattgtgagtgttgagggtgcactggatgaagtaatgaacaagctgcagcgagcaaatccagacgacccagcttatgatgaaaacaagcgccagtgtcaagaagacatcaaggtgatgaacgactatgtcgataaaattattgcagatcgcaaagcaaggggtgaacaaagccatgatttattaacgcagatgctaaacggaaaagatccagcaacgggtgagccgcttgatgacgggaacattcgttatcaaattctgacattcttaattgcgggacacgaaacaacaagtggtcttttatcatttgcgctgtatttcttagtgaaaaatccacatgtattacaaaaagtagcagaagaagcagcacgagttctagtagatcctgttccaagctacaaacaagtcaaacagcttaaatatgtcggcatggtcttaaacgaagcgctgcgcttatggccaactgctcctgcgttttccctatatgcaaaagaagatacggtacttggaggagaatatcctttaaccaaaggcgacgaagtaatggttctgattcctcagcttcaccgtgataaaacaatttggggagacgatgtggaggaattccgtccagagcgttttgaaaatccaagtgcgattccgcagcatgcgtttaaaccgtttggaaacggtcagcgtgcgtgtatcggttggcagttcgctcttcatgaagcaacgctggtacttggtatgatgctaaaacactttgactttgaagatcatacaaactacgagctcgttattaaagaaaagttaacgttaaaacctgaaggctttgtggtaaaagcaaaatcgaaaggcattccgcttggcctgattccttcacctagcactgaacagtctgctaaaaaagtacgcaaaaaggcagaaaacgctcataatacgccgctgcttgtgctatacggttcaaatgcgggaacagctgaaggaacggcgcgtgatttagcagatattgcaatgagcaaaggatttgcaccgcaggtcgcaacgcttgattcacacgccggaaatcttccgcgcgaaggagctgtattaattgtaacggcgtcttataacggtcatccgcctgataacgcaaagcagtttgtcgactggttagaccaagcgtctgctgatgaagtaaaaggcgttcgctactccgtatttggatgcggcgataaaaactgggctgcgacgtatcaaaaagtgcctgcttttatcgatgaaacgcttgccgctaaaggggcagaaaacatcgctgaccgcggtttcggtgatgcaagcgacgactttgaaggcgcgtatgaagaatggagtgatcatatgtggagtgacgtagcagcctactttaacctcgacattgaaaacagtgaagataataaatctactctttcacttcaatttgtcgacagcgccgcggatatgccgcttgcgaaaatgcacggtgcgttttcaacgaacgtcgtagcaagcaaagaacttcaacagccaggcagtgcacgaagcacgcgacatcttgaaattgaacttccaaaagaagcttcttatcaagaaggagatcatttaggtgttattcctcgcaactatgaaggaatagtaaaccgtgtaacagcaaggttcggcctaagcgcatcacagcaaatccgtctggaagcagaagaagaaaaattagctcatttgccactcgctaaaacagtatccgtagaagagcttctgcaatacgtggagcttcaagatcctgttacgcgcacgcagcttcgcgcaatggctgctaaaacggtctgcccgccgcataaagtagagcttgaagccttgcttgaaaagcaagcctacaaagaacaagtgctggcaaaacgtttaacaatgcttgaactgcttgaaaaatacccggcgtgtgaaatgaaattcagcgaatttatcgcccttctgccaagcatacgcccgcgctattactcgatttcttcatcacctcgtgtcgatgaaaaacaagcaagcatcacggtcagcgttgtctcaggaccggcgtggagcggatatggagaatataaaggaattgcgtcgaactatcttgccgagctgcaagaaggagatacgattacgtgctttatttccacagatcagtcagaatttacgctgccaaaagaccctctgactccgcttatcatggtcggaccgggaacaggcgtcgcgccgtttagaggctttgtgcaggcgcgcaaacagctaaaagaacaaggacagtcacttggagaagcacatttatacttcggctgccgttcacctcatgaagactatctgtatcaagaagagcttgaaaacgcccaaagcgaaggcatcattacgcttcataccgctttttctcgcatgccaaatcagccgaaaacatacgttcagcacgtaatggaacaagacggcaagaaattgattgaacttcttgatcaaggagcgcacttctatatttgcggagacggaagccaaatggcacctgccgttgaagcaacgcttatgaaaagctatgctgacgttcaccaagtgagtgaggcagacgctcgcttatggctgcagcagctagaagaaaaaggccgatacgcaaaagacgtgtgggctggg

SEQ ID NO: 764 - protein, 1049 aa, synthetic construct
  REGION 1..1049: note = Variant of cytochrome P450
MTIKEMPQPKTFGELKNLPLLNTDKPVQALMRIADELGEIFKFEAPGSVTRFLSSQRLIKEACDESRFDKNLSQGLKFARDFLGDGLFTSWTHEPNWKKAHNILGPSFSQHAMGRYHAMMVDIAVQLVQKWERLNADEHIEVSEDMTRLTLDTIGLCGFNYRFNSFYRDQPHPFIVSVEGALDEVMNKLQRANPDDPAYDENKRQCQEDIKVMNDYVDKIIADRKARGEQSHDLLTQMLNGKDPATGEPLDDGNIRYQILTFLIAGHETTSGLLSFALYFLVKNPHVLQKVAEEAARVLVDPVPSYKQVKQLKYVGMVLNEALRLWPTAPAFSLYAKEDTVLGGEYPLTKGDEVMVLIPQLHRDKTIWGDDVEEFRPERFENPSAIPQHAFKPFGNGQRACIGWQFALHEATLVLGMMLKHFDFEDHTNYELVIKEKLTLKPEGFVVKAKSKGIPLGLIPSPSTEQSAKKVRKKAENAHNTPLLVLYGSNAGTAEGTARDLADIAMSKGFAPQVATLDSHAGNLPREGAVLIVTASYNGHPPDNAKQFVDWLDQASADEVKGVRYSVFGCGDKNWAATYQKVPAFIDETLAAKGAENIADRGFGDASDDFEGAYEEWSDHMWSDVAAYFNLDIENSEDNKSTLSLQFVDSAADMPLAKMHGAFSTNVVASKELQQPGSARSTRHLEIELPKEASYQEGDHLGVIPRNYEGIVNRVTARFGLSASQQIRLEAEEEKLAHLPLAKTVSVEELLQYVELQDPVTRTQLRAMAAKTVCPPHKVELEALLEKQAYKEQVLAKRLTMLELLEKYPACEMKFSEFIALLPSIRPRYYSISSSPRVDEKQASITVSVVSGPAWSGYGEYKGIASNYLAELQEGDTITCFISTDQSEFTLPKDPLTPLIMVGPGTGVAPFRGFVQARKQLKEQGQSLGEAHLYFGCRSPHEDYLYQEELENAQSEGIITLHTAFSRMPNQPKTYVQHVMEQDGKKLIELLDQGAHFYICGDGSQMAPAVEATLMKSYADVHQVSEADARLWLQQLEEKGRYAKDVWAG

SEQ ID NO: 765 - DNA, 3147 bp, synthetic construct
  misc_feature 1..3147: note = Variant of cytochrome P450
  source 1..3147: mol_type = other DNA
atgacaattaaggaaatgcctcagcctaagacgtttggagaacttaaaaatttaccgttattaaacacagataaaccggttcaagctttgatgcgtattgcggatgaattaggagaaatctttaaattcgaggcgcctggtagcgtaacgcgctttttatcaagtcagcgtctaattaaagaagcatgcgatgaacgtcgctttgataaaaacttaagtcaaggccttaaatttgcacgtgattttcttggagacgggttatttacaagctggacgcatgaaccgaattggaaaaaagcgcataatatcttaggcccaagctttagtcagcatgcaatgggccgttatcatgcgatgatggtcgatatcgccgtgcagcttgttcaaaagtgggagcgtctaaatgcagatgagcatattgaagtatcggaagacatgacacgtttaacgctggatacaattggtctttgcggcttcaactatcgctttaacagcttttaccgagatcagccgcatccatttattgtgagtgttgagggtgcactggatgaagtaatgaacaagctgcagcgagcaaatccagacgacccagcttatgatgaaaacaagcgccagtgtcaagaagacatcaaggtgatgaacgactatgtcgataaaattattgcagatcgcaaagcaaggggtgaacaaagccatgatttattaacgcagatgctaaacggaaaagatccagcaacgggtgagccgcttgatgacgggaacattcgttatcaaattctgacattcttaattgcgggacacgaaacaacaagtggtcttttatcatttgcgctgtatttcttagtgaaaaatccacatgtattacaaaaagtagcagaagaagcagcacgagttctagtagatcctgttccaagctacaaacaagtcaaacagcttaaatatgtcggcatggtcttaaacgaagcgctgcgcttatggccaactgctcctgcgttttccctatatgcaaaagaagatacggtacttggaggagaatatcctttaaccaaaggcgacgaagtaatggttctgattcctcagcttcaccgtgataaaacaatttggggagacgatgtggaggaattccgtccagagcgttttgaaaatccaagtgcgattccgcagcatgcgtttaaaccgtttggaaacggtcagcgtgcgtgtatcggttggcagttcgctcttcatgaagcaacgctggtacttggtatgatgctaaaacactttgactttgaagatcatacaaactacgagctcgttattaaagaaaagttaacgttaaaacctgaaggctttgtggtaaaagcaaaatcgaaaggcattccgcttggcctgattccttcacctagcactgaacagtctgctaaaaaagtacgcaaaaaggcagaaaacgctcataatacgccgctgcttgtgctatacggttcaaatgcgggaacagctgaaggaacggcgcgtgatttagcagatattgcaatgagcaaaggatttgcaccgcaggtcgcaacgcttgattcacacgccggaaatcttccgcgcgaaggagctgtattaattgtaacggcgtcttataacggtcatccgcctgataacgcaaagcagtttgtcgactggttagaccaagcgtctgctgatgaagtaaaaggcgttcgctactccgtatttggatgcggcgataaaaactgggctgcgacgtatcaaaaagtgcctgcttttatcgatgaaacgcttgccgctaaaggggcagaaaacatcgctgaccgcggtttcgctgatgcaagcgacgactttgaaggcgcgtatgaagaatggagtgatcatatgtggagcgacgtagcagcctactttaacctcgacattgaaaacagtgaagataataaatctactcttagccttcaatttgtcgacagcgccgcggatatgccgcttgcgaaaatgcacggtgcgttttcaacgaacgtcgtagcaagcaaagaacttcaacagccaggcagtgcacgaagcacgcgacatcttgaaattgaacttccaaaagaagcttcttatcaagaaggagatcatttaggtgttattcctcgcaactatgaaggaatagtaaaccgtgtaacagcaaggttcggcctaagcgcatcacagctgatccgtctggaagcagaagaagaaaaattagctcatttgccactcgctaaaacagtatccgtagaagagcttctgcaatacgtggagcttcaagatcctgttacgcgcacgcagcttcgcgcaatggctgctaaaacggtctgcccgccgcataaagtagagcttgaagccttgcttgaaaagcaagcctacaaagaacaagtgctggcaaaacgtttaacaatgcttgaactgcttgaaaaatacccggcgtgtgaaatgaaattcagcgaatttatcgcccttctgccaagcatacgcccgcgctattactcgatttcttcatcacctcgtgtcgatgaaaaacaagcaagcatcacggtcagcgttgtctcaggaccagcgtggagcggatatggagaatataaaggaattgcgtcgaactatcttgccgagctgcaagaaggagatacgattacgtgctttatttccacagatcagtcagaatttacgctgccaaaagaccctgaaactccgcttatcatggtcggaccgggaacaggcgtcgcgccgtttagaggctttgtgcaggcgcgcaaacagctaaaagaacaaggacagtcacttggagaagcacatttatacttcggctgccgttcacctcatgaagactatctgtatcaagaagagcttgaaaacgcccaaagcgaaggcatcattacgcttcataccgctttttctcgcatgccaaatcagccgaaaacatacgttcagcacgtaatggaacaagacggcaagaaattgattgaacttcttgatcaaggagcgcacttctatatctgcggagacggaagccaaatggcacctgccgttgaagcaacgcttatgaaaagctatgctgacgttcaccaagtgagtgaggcagacgctcgcttatggctgcagcagctagaagaaaaaggccgatacgcaaaagacgtgtgggctggg

SEQ ID NO: 766 - protein, 1049 aa, synthetic construct
  REGION 1..1049: note = Variant of cytochrome P450
MTIKEMPQPKTFGELKNLPLLNTDKPVQALMRIADELGEIFKFEAPGSVTRFLSSQRLIKEACDERRFDKNLSQGLKFARDFLGDGLFTSWTHEPNWKKAHNILGPSFSQHAMGRYHAMMVDIAVQLVQKWERLNADEHIEVSEDMTRLTLDTIGLCGFNYRFNSFYRDQPHPFIVSVEGALDEVMNKLQRANPDDPAYDENKRQCQEDIKVMNDYVDKIIADRKARGEQSHDLLTQMLNGKDPATGEPLDDGNIRYQILTFLIAGHETTSGLLSFALYFLVKNPHVLQKVAEEAARVLVDPVPSYKQVKQLKYVGMVLNEALRLWPTAPAFSLYAKEDTVLGGEYPLTKGDEVMVLIPQLHRDKTIWGDDVEEFRPERFENPSAIPQHAFKPFGNGQRACIGWQFALHEATLVLGMMLKHFDFEDHTNYELVIKEKLTLKPEGFVVKAKSKGIPLGLIPSPSTEQSAKKVRKKAENAHNTPLLVLYGSNAGTAEGTARDLADIAMSKGFAPQVATLDSHAGNLPREGAVLIVTASYNGHPPDNAKQFVDWLDQASADEVKGVRYSVFGCGDKNWAATYQKVPAFIDETLAAKGAENIADRGFADASDDFEGAYEEWSDHMWSDVAAYFNLDIENSEDNKSTLSLQFVDSAADMPLAKMHGAFSTNVVASKELQQPGSARSTRHLEIELPKEASYQEGDHLGVIPRNYEGIVNRVTARFGLSASQLIRLEAEEEKLAHLPLAKTVSVEELLQYVELQDPVTRTQLRAMAAKTVCPPHKVELEALLEKQAYKEQVLAKRLTMLELLEKYPACEMKFSEFIALLPSIRPRYYSISSSPRVDEKQASITVSVVSGPAWSGYGEYKGIASNYLAELQEGDTITCFISTDQSEFTLPKDPETPLIMVGPGTGVAPFRGFVQARKQLKEQGQSLGEAHLYFGCRSPHEDYLYQEELENAQSEGIITLHTAFSRMPNQPKTYVQHVMEQDGKKLIELLDQGAHFYICGDGSQMAPAVEATLMKSYADVHQVSEADARLWLQQLEEKGRYAKDVWAG

SEQ ID NO: 767 - DNA, 3147 bp, synthetic construct
  misc_feature 1..3147: note = Variant of cytochrome P450
  source 1..3147: mol_type = other DNA
atgacaattaaggaaatgcctcagcctaagacgtttggagaacttaaaaatttaccgttattaaacacagataaaccggttcaagctttgatgcgtattgcggatgaattaggagaaatctttaaattcgaggcgcctggtagcgtaacgcgctttttatcaagtcagcgtctaattaaagaagcatgcgatgaacgtcgctttgataaaaacttaagtcaaggccttaaatttgcacgtgattttcttggagacgggttatttacaagctggacgcatgaaccgaattggaaaaaagcgcataatatcttaggcccaagctttagtcagctggcaatgggccgttatcatgcgatgatggtcgatatcgccgtgcagcttgttcaaaagtgggagcgtctaaatgcagatgagcatattgaagtatcggaagacatgacacgtttaacgctggatacaattggtctttgcggcttcaactatcgctttaacagcttttaccgagatcagccgcatccatttattgtgagtgttgagggtgcactggatgaagtaatgaacaagctgcagcgagcaaatccagacgacccagcttatgatgaaaacaagcgccagtgtcaagaagacatcaaggtgatgaacgactatgtcgataaaattattgcagatcgcaaagcaaggggtgaacaaagccatgatttattaacgcagatgctaaacggaaaagatccagcaacgggtgagccgcttgatgacgggaacattcgttatcaaattctgacattcttaattgcgggacacgaaacaacaagtggtcttttatcatttgcgctgtatttcttagtgaaaaatccacatgtattacaaaaagtagcagaagaagcagcacgagttctagtagatcctgttccaagctacaaacaagtcaaacagcttaaatatgtcggcatggtcttaaacgaagcgctgcgcttatggccaactgctcctgcgttttccctatatgcaaaagaagatacggtacttggaggagaatatcctttaaccaaaggcgacgaagtaatggttctgattcctcagcttcaccgtgataaaacaatttggggagacgatgtggaggaattccgtccagagcgttttgaaaatccaagtgcgattccgcagcatgcgtttaaaccgtttggaaacggtcagcgtgcgtgtatcggttggcagttcgctcttcatgaagcaacgctggtacttggtatgatgctaaaacactttgactttgaagatcatacaaactacgagctcgttattaaagaaaagttaacgttaaaacctgaaggctttgtggtaaaagcaaaatcgaaaggcattccgcttggcctgattccttcacctagcactgaacagtctgctaaaaaagtacgcaaaaaggcagaaaacgctcataatacgccgctgcttgtgctatacggttcaaatgcgggaacagctgaaggaacggcgcgtgatttagcagatattgcaatgagcaaaggatttgcaccgcaggtcgcaacgcttgattcacacgccggaaatcttccgcgcgaaggagctgtattaattgtaacggcgtcttataacggtcatccgcctgataacgcaaagcagtttgtcgactggttagaccaagcgtctgctgatgaagtaaaaggcgttcgctactccgtatttggatgcggcgataaaaactgggctgcgacgtatcaaaaagtgcctgcttttatcgatgaaacgcttgccgctaaaggggcagaaaacatcgctgaccgcggtgaagcagatgcaagcgacgactttgaaggcgcgtatgaagaatggagtgatcatatgtggcaagacgtagcagcctactttaacctcgacattgaaaacagtgaagataataaatctactctttcacttcaatttgtcgacagcgccgcggatatgccgcttgcgaaaatgcacggtgcgttttcaacgaacgtcgtagcaagcaaagaacttcaacagccaggcagtgcacgaagcacgcgacatcttgaaattgaacttccaaaagaagcttcttatcaagaaggagatcatttaggtgttattcctcgcaactatgaaggaatagtaaaccgtgtaacagcaaggttcggcctaagcgcatcacagcagatccgtctggaagcagaagaagaaaaattagctcatttgccactcgctaaaacagtatccgtagaagagcttctgcaatacgtggagcttcaagatcctgttacgcgcacgcagcttcgcgcaatggctgctaaaacggtctgcccgccgcataaagtagagcttgaagccttgcttgaaaagcaagcctacaaagaacaagtgctggcaaaacgtttaacaatgcttgaactgcttgaaaaatacccggcgtgtgaaatgaaattcagcgaatttatcgcccttctgccaagcatacgcccgcgctattactcgatttcttcatcacctcgtgtcgatgaaaaacaagcaagcatcacggtcagcgttgtctcaggaccagcgtggagcggatatggagaatataaaggaattgcgtcgaactatcttgccgagctgcaagaaggagatacgattacgtgctttatttccacagatcagtcagaatttacgctgccaaaagaccctgaaacgccgcttatcatggtcggaccgggaacaggcgtcgcgccgtttagaggctttgtgcaggcgcgcaaacagctaaaagaacaaggacagtcacttggagaagcacatttatacttcggctgccgttcacctcatgaagactatctgtatcaagaagagcttgaaaacgcccaaagcgaaggcatcattacgcttcataccgctttttctcgcatgccaaatcagccgaaaacatacgttcagcacgtaatggaacaagacggcaagaaattgattgaacttcttgatcaaggagcgcacttctatatctgcggagacggaagccaaatggcacctgccgttgaagcaacgcttatgaaaagctatgctgacgttcaccaagtgagtgaggcagacgctcgcttatggctgcagcagctagaagaaaaaggccgatacgcaaaagacgtgtgggctggg

SEQ ID NO: 768 - protein, 1049 aa, synthetic construct
  REGION 1..1049: note = Variant of cytochrome P450
MTIKEMPQPKTFGELKNLPLLNTDKPVQALMRIADELGEIFKFEAPGSVTRFLSSQRLIKEACDERRFDKNLSQGLKFARDFLGDGLFTSWTHEPNWKKAHNILGPSFSQLAMGRYHAMMVDIAVQLVQKWERLNADEHIEVSEDMTRLTLDTIGLCGFNYRFNSFYRDQPHPFIVSVEGALDEVMNKLQRANPDDPAYDENKRQCQEDIKVMNDYVDKIIADRKARGEQSHDLLTQMLNGKDPATGEPLDDGNIRYQILTFLIAGHETTSGLLSFALYFLVKNPHVLQKVAEEAARVLVDPVPSYKQVKQLKYVGMVLNEALRLWPTAPAFSLYAKEDTVLGGEYPLTKGDEVMVLIPQLHRDKTIWGDDVEEFRPERFENPSAIPQHAFKPFGNGQRACIGWQFALHEATLVLGMMLKHFDFEDHTNYELVIKEKLTLKPEGFVVKAKSKGIPLGLIPSPSTEQSAKKVRKKAENAHNTPLLVLYGSNAGTAEGTARDLADIAMSKGFAPQVATLDSHAGNLPREGAVLIVTASYNGHPPDNAKQFVDWLDQASADEVKGVRYSVFGCGDKNWAATYQKVPAFIDETLAAKGAENIADRGEADASDDFEGAYEEWSDHMWQDVAAYFNLDIENSEDNKSTLSLQFVDSAADMPLAKMHGAFSTNVVASKELQQPGSARSTRHLEIELPKEASYQEGDHLGVIPRNYEGIVNRVTARFGLSASQQIRLEAEEEKLAHLPLAKTVSVEELLQYVELQDPVTRTQLRAMAAKTVCPPHKVELEALLEKQAYKEQVLAKRLTMLELLEKYPACEMKFSEFIALLPSIRPRYYSISSSPRVDEKQASITVSVVSGPAWSGYGEYKGIASNYLAELQEGDTITCFISTDQSEFTLPKDPETPLIMVGPGTGVAPFRGFVQARKQLKEQGQSLGEAHLYFGCRSPHEDYLYQEELENAQSEGIITLHTAFSRMPNQPKTYVQHVMEQDGKKLIELLDQGAHFYICGDGSQMAPAVEATLMKSYADVHQVSEADARLWLQQLEEKGRYAKDVWAG

SEQ ID NO: 769 - DNA, 3147 bp, synthetic construct
  misc_feature 1..3147: note = Variant of cytochrome P450
  source 1..3147: mol_type = other DNA
atgacaattaaggaaatgcctcagcctaagacgtttggagaacttaaaaatttaccgttattaaacacagataaaccggttcaagctttgatgcgtattgcggatgaattaggagaaatctttaaattcgaggcgcctggtagcgtaacgcgctttttatcaagtcagcgtctaattaaagaagcatgcgatgaacgtcgctttgataaaaacttaagtcaaggccttaaatttgcacgtgattttcttggagacgggttatttacaagctggacgcatgaaccgaattggaaaaaagcgcataatatcttaggcccaagctttagtcagctggcaatgggccgttatcatgcgatgatggtcgatatcgccgtgcagcttgttcaaaagtgggagcgtctaaatgcagatgagcatattgaagtatcggaagacatgacacgtttaacgctggatacaattggtctttgcggcttcaactatcgctttaacagcttttaccgagatcagccgcatccatttattgtgagtgttgagggtgcactggatgaagtaatgaacaagctgcagcgagcaaatccagacgacccagcttatgatgaaaacaagcgccagtgtcaagaagacatcaaggtgatgaacgactatgtcgataaaattattgcagatcgcaaagcaaggggtgaacaaagccatgatttattaacgcagatgctaaacggaaaagatccagcaacgggtgagccgcttgatgacgggaacattcgttatcaaattctgacattcttaattgcgggacacgaaacaacaagtggtcttttatcatttgcgctgtatttcttagtgaaaaatccacatgtattacaaaaagtagcagaagaagcagcacgagttctagtagatcctgttccaagctacaaacaagtcaaacagcttaaatatgtcggcatggtcttaaacgaagcgctgcgcttatggccaactgctcctgcgttttccctatatgcaaaagaagatacggtacttggaggagaatatcctttaaccaaaggcgacgaagtaatggttctgattcctcagcttcaccgtgataaaacaatttggggagacgatgtggaggagttccgtccagagcgttttgaaaatccaagtgcgattccgcagcatgcgtttaaaccgtttggaaacggtcagcgtgcgtgtatcggttggcagttcgctcttcatgaagcaacgctggtacttggtatgatgctaaaacactttgactttgaagatcatacaaactacgagctcgttattaaagaaaagttaacgttaaaacctgaaggctttgtggtaaaagcaaaatcgaaaggcattccgcttggcctgattccttcacctagcactgaacagtctgctaaaaaagtacgcaaaaaggcagaaaacgctcataatacgccgctgcttgtgctatacggttcaaatgcgggaacagctgaaggaacggcgcgtgatttagcagatattgcaatgagcaaaggatttgcaccgcaggtcgcaacgcttgattcacacgccggaaatcttccgcgcgaaggagctgtattaattgtaacggcgtcttataacggtcatccgcctgataacgcaaagcagtttgtcgactggttagaccaagcgtctgctgatgaagtaaaaggcgttcgctactccgtatttggatgcggcgataaaaactgggctgcgacgtatcaaaaagtgcctgcttttatcgatgaaacgcttgccgctaaaggggcagaaaacatcgctgaccgcggtttcgctgatgcaagcgacgactttgaaggcgcgtatgaagaatggagtgatcatatgtggcaagacgtagcagcctactttaacctcgacattgaaaacagtgaagataataaatctactctttcacttcaatttgtcgacagcgccgcggatatgccgcttgcgaaaatgcacggtgcgttttcaacgaacgtcgtagcaagcaaagaacttcaacagccaggcagtgcacgaagcacgcgacatcttgaaattgaacttccaaaagaagcttcttatcaagaaggagatcatttaggtgttattcctcgcaactatgaaggaatagtaaaccgtgtaacagcaaggttcggcctaagcgcatcacagctgatccgtctggaagcagaagaagaaaaattagctcatttgccactcgctaaaacagtatccgtagaagagcttctgcaatacgtggagcttcaagatcctgttacgcgcacgcagcttcgcgcaatggctgctaaaacggtctgcccgccgcataaagtagagcttgaagccttgcttgaaaagcaagcctacaaagaacaagtgctggcaaaacgtttaacaatgcttgaactgcttgaaaaatacccggcgtgtgaaatgaaattcagcgaatttatcgcccttctgccaagcatacgcccgcgctattactcgatttcttcatcacctcgtgtcgatgaaaaacaagcaagcatcacggtcagcgttgtctcaggagacgcgtggagcggatatggagaatataaaggaattgcgtcgaactatcttgccgagctgcaagaaggagatacgattacgtgctttatttccacagatcagtcagaatttacgctgccaaaagaccctctggtgccgcttatcatggtcggaccgggaacaggcgtcgcgccgtttagaggctttgtgcaggcgcgcaaacagctaaaagaacaaggacagtcacttggagaagcacatttatacttcggctgccgttcacctcatgaagactatctgtatcaagaagagcttgaaaacgcccaaagcgaaggcatcattacgcttcataccgctttttctcgcatgccaaatcagccgaaaacatacgttcagcacgtaatggaacaagacggcaagaaattgattgaacttcttgatcaaggagcgcacttctatatttgcggagacggaagccaaatggcacctgccgttgaagcaacgcttatgaaaagctatgctgacgttcaccaagtgagtgaggcagacgctcgcttatggctgcagcagctagaagaaaaaggccgatacgcaaaagacgtgtgggctggg

SEQ ID NO: 770 - protein, 1049 aa, synthetic construct
  REGION 1..1049: note = Variant of cytochrome P450
MTIKEMPQPKTFGELKNLPLLNTDKPVQALMRIADELGEIFKFEAPGSVTRFLSSQRLIKEACDERRFDKNLSQGLKFARDFLGDGLFTSWTHEPNWKKAHNILGPSFSQLAMGRYHAMMVDIAVQLVQKWERLNADEHIEVSEDMTRLTLDTIGLCGFNYRFNSFYRDQPHPFIVSVEGALDEVMNKLQRANPDDPAYDENKRQCQEDIKVMNDYVDKIIADRKARGEQSHDLLTQMLNGKDPATGEPLDDGNIRYQILTFLIAGHETTSGLLSFALYFLVKNPHVLQKVAEEAARVLVDPVPSYKQVKQLKYVGMVLNEALRLWPTAPAFSLYAKEDTVLGGEYPLTKGDEVMVLIPQLHRDKTIWGDDVEEFRPERFENPSAIPQHAFKPFGNGQRACIGWQFALHEATLVLGMMLKHFDFEDHTNYELVIKEKLTLKPEGFVVKAKSKGIPLGLIPSPSTEQSAKKVRKKAENAHNTPLLVLYGSNAGTAEGTARDLADIAMSKGFAPQVATLDSHAGNLPREGAVLIVTASYNGHPPDNAKQFVDWLDQASADEVKGVRYSVFGCGDKNWAATYQKVPAFIDETLAAKGAENIADRGFADASDDFEGAYEEWSDHMWQDVAAYFNLDIENSEDNKSTLSLQFVDSAADMPLAKMHGAFSTNVVASKELQQPGSARSTRHLEIELPKEASYQEGDHLGVIPRNYEGIVNRVTARFGLSASQLIRLEAEEEKLAHLPLAKTVSVEELLQYVELQDPVTRTQLRAMAAKTVCPPHKVELEALLEKQAYKEQVLAKRLTMLELLEKYPACEMKFSEFIALLPSIRPRYYSISSSPRVDEKQASITVSVVSGDAWSGYGEYKGIASNYLAELQEGDTITCFISTDQSEFTLPKDPLVPLIMVGPGTGVAPFRGFVQARKQLKEQGQSLGEAHLYFGCRSPHEDYLYQEELENAQSEGIITLHTAFSRMPNQPKTYVQHVMEQDGKKLIELLDQGAHFYICGDGSQMAPAVEATLMKSYADVHQVSEADARLWLQQLEEKGRYAKDVWAG

SEQ ID NO: 771 - DNA, 3147 bp, synthetic construct
  misc_feature 1..3147: note = Variant of cytochrome P450
  source 1..3147: mol_type = other DNA
atgacaattaaggaaatgcctcagcctaagacgtttggagaacttaaaaatttaccgttattaaacacagataaaccggttcaagctttgatgcgtattgcggatgaattaggagaaatctttaaattcgaggcgcctggtagcgtaacgcgctttttatcaagtcagcgtctaattaaagaagcatgcgatgaaagtcgctttgataaaaacttaagtcaaggccttaaatttgcacgtgattttcttggagacgggttatttacaagctggacgcatgaaccgaattggaaaaaagcgcataatatcttaggcccaagctttagtcagctggcaatgcgccgttatcatgcgatgatggtcgatatcgccgtgcagcttgttcaaaagtgggagcgtctaaatgcagatgagcatattgaagtatcggaagacatgacacgtttaacgctggatacaattggtctttgcggcttcaactatcgctttaacagcttttaccgagatcagccgcatccatttattgtgagtgttgagggtgcactggatgaagtaatgaacaagctgcagcgagcaaatccagacgacccagcttatgatgaaaacaagcgccagtgtcaagaagacatcaaggtgatgaacgactatgtcgataaaattattgcagatcgcaaagcaaggggtgaacaaagccatgatttattaacgcagatgctaaacggaaaagatccagcaacgggtgagccgcttgatgacgggaacattcgttatcaaattctgacattcttaattgcgggacacgaaacaacaagtggtcttttatcatttgcgctgtatttcttagtgaaaaatccacatgtattacaaaaagtagcagaagaagcagcacgagttctagtagatcctgttccaagctacaaacaagtcaaacagcttaaatatgtcggcatggtcttaaacgaagcgctgcgcttatggccaactgctcctgcgttttccctatatgcaaaagaagatacggtacttggaggagaatatcctttaaccaaaggcgacgaagtaatggttctgattcctcagcttcaccgtgataaaacaatttggggagacgatgtggaggaattccgtccagagcgttttgaaaatccaagtgcgattccgcagcatgcgtttaaaccgtttggaaacggtcagcgtgcgtgtatcggttggcagttcgctcttcatgaagcaacgctggtacttggtatgatgctaaaacactttgactttgaagatcatacaaactacgagctcgttattaaagaaaagttaacgttaaaacctgaaggctttgtggtaaaagcaaaatcgaaaggcattccgcttggcctgattccttcacctagcactgaacagtctgctaaaaaagtacgcaaaaaggcagaaaacgctcataatacgccgctgcttgtgctatacggttcaaatgcgggaacagctgaaggaacggcgcgtgatttagcagatattgcaatgagcaaaggatttgcaccgcaggtcgcaacgcttgattcacacgccggaaatcttccgcgcgaaggagctgtattaattgtaacggcgtcttataacggtcatccgcctgataacgcaaagcagtttgtcgactggttagaccaagcgtctgctgatgaagtaaaaggcgttcgctactccgtatttggatgcggcgataaaaactgggctgcgacgtatcaaaaagtgcctgcttttatcgatgaaacgcttgccgctaaaggggcagaaaacatcgctgacatgggtttcggtgatgcaagcgacgactttgaaggcgcgtatgaagaatggagtgatcatatgtggagtgacgtagcagcctactttaacctcgacattgaaaacagtgaagataataaatctactctttcacttcaatttgtcgacagcgccgcggatatgccgcttgcgaaaatgcacggtgcgttttcaacgaacgtcgtagcaagcaaagaacttcaacagccaggcagtgcacgaagcacgcgacatcttgaaattgaacttccaaaagaagcttcttatcaagaaggagatcatttaggtgttattcctcgcaactatgaaggaatagtaaaccgtgtaacagcaaggttcggcctaagcgcatcacagcagatccgtctggaagcagaagaagaaaaattagctcatttgccactcgctaaaacagtatccgtagaagagcttctgcaatacgtggagcttcaagatcctgttacgcgcacgcagcttcgcgcaatggctgctaaaacggtctgcccgccgcataaagtagagcttgaagccttgcttgaaaagcaagcctacaaagaacaagtgctggcaaaacgtttaacaatgcttgaactgcttgaaaaatacccggcgtgtgaaatgaaattcagcgaatttatcgcccttctgccaagcatacgcccgcgctattactcgatttcttcatcacctcgtgtcgatgaaaaacaagcaagcatcacggtcagcgttgtctcaggaccggcgtggagcggatatggagaatataaaggaattgcgtcgaactatcttgccgagctgcaagaaggagatacgattacgtgctttatttccacagatcagtcagaatttacgctgccaaaagaccctgaaacgccgcttatcatggtcggaccgggaacaggcgtcgcgccgtttagaggctttgtgcaggcgcgcaaacagctaaaagaacaaggacagtcacttggagaagcacatttatacttcggctgccgttcacctcatgaagactatctgtatcaagaagagcttgaaaacgcccaaagcgaaggcatcattacgcttcataccgctttttctcgcatgccaaatcagccgaaaacatacgttcagcacgtaatggaacaagacggcaagaaattgattgaacttcttgatcaaggagcgcacttctatatctgcggagacggaagccaaatggcacctgccgttgaagcaacgcttatgaaaagctatgctgacgttcaccaagtgagtgaagcagacgctcgcttatggctgcagcagctagaagaaaaaggccgatacgcaaaagacgtgtgggctggg

SEQ ID NO: 772 - protein, 1049 aa, synthetic construct
  REGION 1..1049: note = Variant of cytochrome P450
MTIKEMPQPKTFGELKNLPLLNTDKPVQALMRIADELGEIFKFEAPGSVTRFLSSQRLIKEACDESRFDKNLSQGLKFARDFLGDGLFTSWTHEPNWKKAHNILGPSFSQLAMRRYHAMMVDIAVQLVQKWERLNADEHIEVSEDMTRLTLDTIGLCGFNYRFNSFYRDQPHPFIVSVEGALDEVMNKLQRANPDDPAYDENKRQCQEDIKVMNDYVDKIIADRKARGEQSHDLLTQMLNGKDPATGEPLDDGNIRYQILTFLIAGHETTSGLLSFALYFLVKNPHVLQKVAEEAARVLVDPVPSYKQVKQLKYVGMVLNEALRLWPTAPAFSLYAKEDTVLGGEYPLTKGDEVMVLIPQLHRDKTIWGDDVEEFRPERFENPSAIPQHAFKPFGNGQRACIGWQFALHEATLVLGMMLKHFDFEDHTNYELVIKEKLTLKPEGFVVKAKSKGIPLGLIPSPSTEQSAKKVRKKAENAHNTPLLVLYGSNAGTAEGTARDLADIAMSKGFAPQVATLDSHAGNLPREGAVLIVTASYNGHPPDNAKQFVDWLDQASADEVKGVRYSVFGCGDKNWAATYQKVPAFIDETLAAKGAENIADMGFGDASDDFEGAYEEWSDHMWSDVAAYFNLDIENSEDNKSTLSLQFVDSAADMPLAKMHGAFSTNVVASKELQQPGSARSTRHLEIELPKEASYQEGDHLGVIPRNYEGIVNRVTARFGLSASQQIRLEAEEEKLAHLPLAKTVSVEELLQYVELQDPVTRTQLRAMAAKTVCPPHKVELEALLEKQAYKEQVLAKRLTMLELLEKYPACEMKFSEFIALLPSIRPRYYSISSSPRVDEKQASITVSVVSGPAWSGYGEYKGIASNYLAELQEGDTITCFISTDQSEFTLPKDPETPLIMVGPGTGVAPFRGFVQARKQLKEQGQSLGEAHLYFGCRSPHEDYLYQEELENAQSEGIITLHTAFSRMPNQPKTYVQHVMEQDGKKLIELLDQGAHFYICGDGSQMAPAVEATLMKSYADVHQVSEADARLWLQQLEEKGRYAKDVWAG

SEQ ID NO: 773 - DNA, 3147 bp, synthetic construct
  misc_feature 1..3147: note = Variant of cytochrome P450
  source 1..3147: mol_type = other DNA
atgacaattaaggaaatgcctcagcctaagacgtttggagaacttaaaaatttaccgttattaaacacagataaaccggttcaagctttgatgcgtattgcggatgaattaggagaaatctttaaattcgaggcgcctggtagcgtaacgcgctttttatcaagtcagcgtctaattaaagaagcatgcgatgaaagccgctttgataaaaacttaagtcaaggccttaaatttgcacgtgattttcttggagacgggttatttacaagctggacgcatgaaccgaattggaaaaaagcgcataatatcttaggcccaagctttagtcagctggcaatgggccgttatcatgcgatgatggtcgatatcgccgtgcagcttgttcaaaagtgggagcgtctaaatgcagatgagcatattgaagtatcggaagacatgacacgtttaacgctggatacaattggtctttgcggcttcaactatcgctttaacagcttttaccgagatcagccgcatccatttattgtgagtgttgagggtgcactggatgaagtaatgaacaagctgcagcgagcaaatccagacgacccagcttatgatgaaaacaagcgccagtgtcaagaagacatcaaggtgatgaacgactatgtcgataaaattattgcagatcgcaaagcaaggggtgaacaaagccatgatttattaacgcagatgctaaacggaaaagatccagcaacgggtgagccgcttgatgacgggaacattcgttatcaaattctgacattcttaattgcgggacacgaaacaacaagtggtcttttatcatttgcgctgtatttcttagtgaaaaatccacatgtattacaaaaagtagcagaagaagcagcacgagttctagtagatcctgttccaagctacaaacaagtcaaacagcttaaatatgtcggcatggtcttaaacgaagcgctgcgcttatggccaactgctcctgcgttttccctatatgcaaaagaagatacggtacttggaggagaatatcctttaaccaaaggcgacgaagtaatggttctgattcctcagcttcaccgtgataaaacaatttggggagacgatgtggagtcgttccgtccagagcgttttgaaaatccaagtgcgattccgcagcatgcgtttaaaccgtttggaaacggtcagcgtgcgtgtatcggttggcagttcgctcttcatgaagcaacgctggtacttggtatgatgctaaaacactttgactttgaagatcatacaaactacgagctcgttattaaagaaaagttaacgttaaaacctgaaggctttgtggtaaaagcaaaatcgaaaggcattccgcttggcctgattccttcacctagcactgaacagtctgctaaaaaagtacgcaaaaaggcagaaaacgctcataatacgccgctgcttgtgctatacggttcaaatgcgggaacagctgaaggaacggcgcgtgatttagcagatattgcaatgagcaaaggatttgcaccgcaggtcgcaacgcttgattcacacgccggaaatcttccgcgcgaaggagctgtattaattgtaacggcgtcttataacggtcatccgcctgataacgcaaagcagtttgtcgactggttagaccaagcgtctgctgatgaagtaaaaggcgttcgctactccgtatttggatgcggcgataaaaactgggctgcgacgtatcaaaaagtgcctgcttttatcgatgaaacgcttgccgctaaaggggcagaaaacatcgctgaccgcggtttcggtgatgcaagcgacgactttgaaggcgcgtatgaagaatggagtgatcatatgtggagtgacgtagcagcctactttaacctcgacattgaaaacagtgaagataataaatctactctttcacttcaatttgtcgacagcgccgcggatatgccgcttgcgaaaatgcacggtgcgttttcaacgaacgtcgtagcaagcaaagaacttcaacagccaggcagtgcacgaagcacgcgacatcttgaaattgaacttccaaaagaagcttcttatcaagaaggagatcatttaggtgttattcctcgcaactatgaaggaatagtaaaccgtgtaacagcaaggttcggcctaagcgcatcacagctgatccgtctggaagcagaagaagaaaaattagctcatttgccactcgctaaaacagtatccgtagaagagcttctgcaatacgtggagcttcaagatcctgttacgcgcacgcagcttcgcgcaatggctgctaaaacggtctgcccgccgcataaagtagagcttgaagccttgcttgaaaagcaagcctacaaagaacaagtgctggcaaaacgtttaacaatgcttgaactgcttgaaaaatacccggcgtgtgaaatgaaattcagcgaatttatcgcccttctgccaagcatacgcccgcgctattactcgatttcttcatcacctcgtgtcgatgaaaaacaagcaagcatcacggtcagcgttgtctcaggagacgcgtggagcggatatggagaatataaaggaattgcgtcgaactatcttgccgagctgcaagaaggagatacgattacgtgctttatttccacagatcagtcagaatttacgctgccaaaagaccctgaaacgccgcttatcatggtcggaccgggaacaggcgtcgcgccgtttagaggctttgtgcaggcgcgcaaacagctaaaagaacaaggacagtcacttggagaagcacatttatacttcggctgccgttcacctcatgaagactatctgtatcaagaagagcttgaaaacgcccaaagcgaaggcatcattacgcttcataccgctttttctcgcatgccaaatcagccgaaaacatacgttcagcacgtaatggaacaagacggcaagaaattgattgaacttcttgatcaaggagcgcacttctattgttgcggagacggaagccaaatggcacctgccgttgaagcaacgcttatgaaaagctatgctgacgttcaccaagtgagtgaggcagacgctcgcttatggctgcagcagctagaagaaaaaggccgatacgcaaaagacgtgtgggctggg

SEQ ID NO: 774 - protein, 1049 aa, synthetic construct
  REGION 1..1049: note = Variant of cytochrome P450
MTIKEMPQPKTFGELKNLPLLNTDKPVQALMRIADELGEIFKFEAPGSVTRFLSSQRLIKEACDESRFDKNLSQGLKFARDFLGDGLFTSWTHEPNWKKAHNILGPSFSQLAMGRYHAMMVDIAVQLVQKWERLNADEHIEVSEDMTRLTLDTIGLCGFNYRFNSFYRDQPHPFIVSVEGALDEVMNKLQRANPDDPAYDENKRQCQEDIKVMNDYVDKIIADRKARGEQSHDLLTQMLNGKDPATGEPLDDGNIRYQILTFLIAGHETTSGLLSFALYFLVKNPHVLQKVAEEAARVLVDPVPSYKQVKQLKYVGMVLNEALRLWPTAPAFSLYAKEDTVLGGEYPLTKGDEVMVLIPQLHRDKTIWGDDVESFRPERFENPSAIPQHAFKPFGNGQRACIGWQFALHEATLVLGMMLKHFDFEDHTNYELVIKEKLTLKPEGFVVKAKSKGIPLGLIPSPSTEQSAKKVRKKAENAHNTPLLVLYGSNAGTAEGTARDLADIAMSKGFAPQVATLDSHAGNLPREGAVLIVTASYNGHPPDNAKQFVDWLDQASADEVKGVRYSVFGCGDKNWAATYQKVPAFIDETLAAKGAENIADRGFGDASDDFEGAYEEWSDHMWSDVAAYFNLDIENSEDNKSTLSLQFVDSAADMPLAKMHGAFSTNVVASKELQQPGSARSTRHLEIELPKEASYQEGDHLGVIPRNYEGIVNRVTARFGLSASQLIRLEAEEEKLAHLPLAKTVSVEELLQYVELQDPVTRTQLRAMAAKTVCPPHKVELEALLEKQAYKEQVLAKRLTMLELLEKYPACEMKFSEFIALLPSIRPRYYSISSSPRVDEKQASITVSVVSGDAWSGYGEYKGIASNYLAELQEGDTITCFISTDQSEFTLPKDPETPLIMVGPGTGVAPFRGFVQARKQLKEQGQSLGEAHLYFGCRSPHEDYLYQEELENAQSEGIITLHTAFSRMPNQPKTYVQHVMEQDGKKLIELLDQGAHFYCCGDGSQMAPAVEATLMKSYADVHQVSEADARLWLQQLEEKGRYAKDVWAG

SEQ ID NO: 775 - DNA, 3147 bp, synthetic construct
  misc_feature 1..3147: note = Variant of cytochrome P450
  source 1..3147: mol_type = other DNA
atgacaattaaggaaatgcctcagcctaagacgtttggagaacttaaaaatttaccgttattaaacacagataaaccggttcaagctttgatgcgtattgcggatgaattaggagaaatctttaaattcgaggcgcctggtagcgtaacgcgctttttatcaagtcagcgtctaattaaagaagcatgcgatgaaagtcgctttgataaaaacttaagtcaaggccttaaatttgcacgtgattttcttggagacgggttatttacaagctggacgcatgaaccgaattggaaaaaagcgcataatatcttaggcccaagctttagtcagctggcaatgggccgttatcatgcgatgatggtcgatatcgccgtgcagcttgttcaaaagtgggagcgtctaaatgcagatgagcatattgaagtatcggaagacatgacacgtttaacgctggatacaattggtctttgcggcttcaactatcgctttaacagcttttaccgagatcagccgcatccatttattgtgagtgttgagggtgcactggatgaagtaatgaacaagctgcagcgagcaaatccagacgacccagcttatgatgaaaacaagcgccagtgtcaagaagacatcaaggtgatgaacgactatgtcgataaaattattgcagatcgcaaagcaaggggtgaacaaagccatgatttattaacgcagatgctaaacggaaaagatccagcaacgggtgagccgcttgatgacgggaacattcgttatcaaattctgacattcttaattgcgggacacgaaacaacaagtggtcttttatcatttgcgctgtatttcttagtgaaaaatccacatgtattacaaaaagtagcagaagaagcagcacgagttctagtagatcctgttccaagctacaaacaagtcaaacagcttaaatatgtcggcatggtcttaaacgaagcgctgcgcttatggccaactgctcctgcgttttccctatatgcaaaagaagatacggtacttggaggagaatatcctttaaccaaaggcgacgaagtaatggttctgattcctcagcttcaccgtgataaaacaatttggggagacgatgtggagtcgttccgtccagagcgttttgaaaatccaagtgcgattccgcagcatgcgtttaaaccgtttggaaacggtcagcgtgcgtgtatcggttggcagttcgctcttcatgaagcaacgctggtacttggtatgatgctaaaacactttgactttgaagatcatacaaactacgagctcgttattaaagaaaagttaacgttaaaacctgaaggctttgtggtaaaagcaaaatcgaaaggcattccgcttggcctgattccttcacctagcactgaacagtctgctaaaaaagtacgcaaaaaggcagaaaacgctcataatacgccgctgcttgtgctatacggttcaaatgcgggaacagctgaaggaacggcgcgtgatttagcagatattgcaatgagcaaaggatttgcaccgcaggtcgcaacgcttgattcacacgccggaaatcttccgcgcgaaggagctgtattaattgtaacggcgtcttataacggtcatccgcctgataacgcaaagcagtttgtcgactggttagaccaagcgtctgctgatgaagtaaaaggcgttcgctactccgtatttggatgcggcgataaaaactgggctgcgacgtatcaaaaagtgcctgcttttatcgatgaaacgcttgccgctaaaggggcagaaaacatcgctgaccgcggtgaagcagatgcaagcgacgactttgaaggcgcgtatgaagaatggagtgatcatatgtggaccgacgtagcagcctactttaacctcgacattgaaaacagtgaagataataaatctactcttagccttcaatttgtcgacagcgccgcggatatgccgcttgcgaaaatgcacggtgcgttttcaacgaacgtcgtagcaagcaaagaacttcaacagccaggcagtgcacgaagcacgcgacatcttgaaattgaacttccaaaagaagcttcttatcaagaaggagatcatttaggtgttattcctcgcaactatgaaggaatagtaaaccgtgtaacagcaaggttcggcctaagcgcatcacagctgatccgtctggaagcagaagaagaaaaattagctcatttgccactcgctaaaacagtatccgtagaagagcttctgcaatacgtggagcttcaagatcctgttacgcgcacgcagcttcgcgcaatggctgctaaaacggtctgcccgccgcataaagtagagcttgaagccttgcttgaaaagcaagcctacaaagaacaagtgctggcaaaacgtttaacaatgcttgaactgcttgaaaaatacccggcgtgtgaaatgaaattcagcgaatttatcgcccttctgccaagcatacgcccgcgctattactcgatttcttcatcacctcgtgtcgatgaaaaacaagcaagcatcacggtcagcgttgtctcaggagacgcgtggagcggatatggagaatataaaggaattgcgtcgaactatcttgccgagctgcaagaaggagatacgattacgtgctttatttccacagatcagtcagaatttacgctgccaaaagaccctctgactccgcttatcatggtcggaccgggaacaggcgtcgcgccgtttagaggctttgtgcaggcgcgcaaacagctaaaagaacaaggacagtcacttggagaagcacatttatacttcggctgccgttcacctcatgaagactatctgtatcaagaagagcttgaaaacgcccaaagcgaaggcatcattacgcttcataccgctttttctcgcatgccaaatcagccgaaaacatacgttcagcacgtaatggaacaagacggcaagaaattgattgaacttcttgatcaaggagcgcacttctattgttgcggagacggaagccaaatggcacctgccgttgaagcaacgcttatgaaaagctatgctgacgttcaccaagtgagtgaagcagacgctcgcttatggctgcagcagctagaagaaaaaggccgatacgcaaaagacgtgtgggctggg

SEQ ID NO: 776 - protein, 1049 aa, synthetic construct
  REGION 1..1049: note = Variant of cytochrome P450
MTIKEMPQPKTFGELKNLPLLNTDKPVQALMRIADELGEIFKFEAPGSVTRFLSSQRLIKEACDESRFDKNLSQGLKFARDFLGDGLFTSWTHEPNWKKAHNILGPSFSQLAMGRYHAMMVDIAVQLVQKWERLNADEHIEVSEDMTRLTLDTIGLCGFNYRFNSFYRDQPHPFIVSVEGALDEVMNKLQRANPDDPAYDENKRQCQEDIKVMNDYVDKIIADRKARGEQSHDLLTQMLNGKDPATGEPLDDGNIRYQILTFLIAGHETTSGLLSFALYFLVKNPHVLQKVAEEAARVLVDPVPSYKQVKQLKYVGMVLNEALRLWPTAPAFSLYAKEDTVLGGEYPLTKGDEVMVLIPQLHRDKTIWGDDVESFRPERFENPSAIPQHAFKPFGNGQRACIGWQFALHEATLVLGMMLKHFDFEDHTNYELVIKEKLTLKPEGFVVKAKSKGIPLGLIPSPSTEQSAKKVRKKAENAHNTPLLVLYGSNAGTAEGTARDLADIAMSKGFAPQVATLDSHAGNLPREGAVLIVTASYNGHPPDNAKQFVDWLDQASADEVKGVRYSVFGCGDKNWAATYQKVPAFIDETLAAKGAENIADRGEADASDDFEGAYEEWSDHMWTDVAAYFNLDIENSEDNKSTLSLQFVDSAADMPLAKMHGAFSTNVVASKELQQPGSARSTRHLEIELPKEASYQEGDHLGVIPRNYEGIVNRVTARFGLSASQLIRLEAEEEKLAHLPLAKTVSVEELLQYVELQDPVTRTQLRAMAAKTVCPPHKVELEALLEKQAYKEQVLAKRLTMLELLEKYPACEMKFSEFIALLPSIRPRYYSISSSPRVDEKQASITVSVVSGDAWSGYGEYKGIASNYLAELQEGDTITCFISTDQSEFTLPKDPLTPLIMVGPGTGVAPFRGFVQARKQLKEQGQSLGEAHLYFGCRSPHEDYLYQEELENAQSEGIITLHTAFSRMPNQPKTYVQHVMEQDGKKLIELLDQGAHFYCCGDGSQMAPAVEATLMKSYADVHQVSEADARLWLQQLEEKGRYAKDVWAG

SEQ ID NO: 777 - DNA, 3147 bp, synthetic construct
  misc_feature 1..3147: note = Variant of cytochrome P450
  source 1..3147: mol_type = other DNA
atgacaattaaggaaatgcctcagcctaagacgtttggagaacttaaaaatttaccgttattaaacacagataaaccggttcaagctttgatgcgtattgcggatgaattaggagaaatctttaaattcgaggcgcctggtagcgtaacgcgctttttatcaagtcagcgtctaattaaagaagcatgcgatgaaagtcgctttgataaaaacttaagtcaaggccttaaatttgcacgtgattttcttggagacgggttatttacaagctggacgcatgaaccgaattggaaaaaagcgcataatatcttaggcccaagctttagtcagcatgcaatgcgccgttatcatgcgatgatggtcgatatcgccgtgcagcttgttcaaaagtgggagcgtctaaatgcagatgagcatattgaagtatcggaagacatgacacgtttaacgctggatacaattggtctttgcggcttcaactatcgctttaacagcttttaccgagatcagccgcatccatttattgtgagtgttgagggtgcactggatgaagtaatgaacaagctgcagcgagcaaatccagacgacccagcttatgatgaaaacaagcgccagtgtcaagaagacatcaaggtgatgaacgactatgtcgataaaattattgcagatcgcaaagcaaggggtgaacaaagccatgatttattaacgcagatgctaaacggaaaagatccagcaacgggtgagccgcttgatgacgggaacattcgttatcaaattctgacattcttaattgcgggacacgaaacaacaagtggtcttttatcatttgcgctgtatttcttagtgaaaaatccacatgtattacaaaaagtagcagaagaagcagcacgagttctagtagatcctgttccaagctacaaacaagtcaaacagcttaaatatgtcggcatggtcttaaacgaagcgctgcgcttatggccaactgctcctgcgttttccctatatgcaaaagaagatacggtacttggaggagaatatcctttaaccaaaggcgacgaagtaatggttctgattcctcagcttcaccgtgataaaacaatttggggagacgatgtggaggagttccgtccagagcgttttgaaaatccaagtgcgattccgcagcatgcgtttaaaccgtttggaaacggtcagcgtgcgtgtatcggttggcagttcgctcttcatgaagcaacgctggtacttggtatgatgctaaaacactttgactttgaagatcatacaaactacgagctcgttattaaagaaaagttaacgttaaaacctgaaggctttgtggtaaaagcaaaatcgaaaggcattccgcttggcctgattccttcacctagcactgaacagtctgctaaaaaagtacgcaaaaaggcagaaaacgctcataatacgccgctgcttgtgctatacggttcaaatgcgggaacagctgaaggaacggcgcgtgatttagcagatattgcaatgagcaaaggatttgcaccgcaggtcgcaacgcttgattcacacgccggaaatcttccgcgcgaaggagctgtattaattgtaacggcgtcttataacggtcatccgcctgataacgcaaagcagtttgtcgactggttagaccaagcgtctgctgatgaagtaaaaggcgttcgctactccgtatttggatgcggcgataaaaactgggctgcgacgtatcaaaaagtgcctgcttttatcgatgaaacgcttgccgctaaaggggcagaaaacatcgctgacatgggtgaggctgatgcaagcgacgactttgaaggcgcgtatgaagaatggagtgatcatatgtggcaagacgtagcagcctactttaacctcgacattgaaaacagtgaagataataaatctactcttagccttcaatttgtcgacagcgccgcggatatgccgcttgcgaaaatgcacggtgcgttttcaacgaacgtcgtagcaagcaaagaacttcaacagccaggcagtgcacgaagcacgcgacatcttgaaattgaacttccaaaagaagcttcttatcaagaaggagatcatttaggtgttattcctcgcaactatgaaggaatagtaaaccgtgtaacagcaaggttcggcctaagcgcatcacagctgatccgtctggaagcagaagaagaaaaattagctcatttgccactcgctaaaacagtatccgtagaagagcttctgcaatacgtggagcttcaagatcctgttacgcgcacgcagcttcgcgcaatggctgctaaaacggtctgcccgccgcataaagtagagcttgaagccttgcttgaaaagcaagcctacaaagaacaagtgctggcaaaacgtttaacaatgcttgaactgcttgaaaaatacccggcgtgtgaaatgaaattcagcgaatttatcgcccttctgccaagcatacgcccgcgctattactcgatttcttcatcacctcgtgtcgatgaaaaacaagcaagcatcacggtcagcgttgtctcaggaccagcgtggagcggatatggagaatataaaggaattgcgtcgaactatcttgccgagctgcaagaaggagatacgattacgtgctttatttccacagatcagtcagaatttacgctgccaaaagaccctgaaactccgcttatcatggtcggaccgggaacaggcgtcgcgccgtttagaggctttgtgcaggcgcgcaaacagctaaaagaacaaggacagtcacttggagaagcacatttatacttcggctgccgttcacctcatgaagactatctgtatcaagaagagcttgaaaacgcccaaagcgaaggcatcattacgcttcataccgctttttctcgcatgccaaatcagccgaaaacatacgttcagcacgtaatggaacaagacggcaagaaattgattgaacttcttgatcaaggagcgcacttctatatctgcggagacggaagccaaatggcacctgccgttgaagcaacgcttatgaaaagctatgctgacgttcaccaagtgagtgaagcagacgctcgcttatggctgcagcagctagaagaaaaaggccgatacgcaaaagacgtgtgggctggg

SEQ ID NO: 778 - protein, 1049 aa, synthetic construct
  REGION 1..1049: note = Variant of cytochrome P450
MTIKEMPQPKTFGELKNLPLLNTDKPVQALMRIADELGEIFKFEAPGSVTRFLSSQRLIKEACDESRFDKNLSQGLKFARDFLGDGLFTSWTHEPNWKKAHNILGPSFSQHAMRRYHAMMVDIAVQLVQKWERLNADEHIEVSEDMTRLTLDTIGLCGFNYRFNSFYRDQPHPFIVSVEGALDEVMNKLQRANPDDPAYDENKRQCQEDIKVMNDYVDKIIADRKARGEQSHDLLTQMLNGKDPATGEPLDDGNIRYQILTFLIAGHETTSGLLSFALYFLVKNPHVLQKVAEEAARVLVDPVPSYKQVKQLKYVGMVLNEALRLWPTAPAFSLYAKEDTVLGGEYPLTKGDEVMVLIPQLHRDKTIWGDDVEEFRPERFENPSAIPQHAFKPFGNGQRACIGWQFALHEATLVLGMMLKHFDFEDHTNYELVIKEKLTLKPEGFVVKAKSKGIPLGLIPSPSTEQSAKKVRKKAENAHNTPLLVLYGSNAGTAEGTARDLADIAMSKGFAPQVATLDSHAGNLPREGAVLIVTASYNGHPPDNAKQFVDWLDQASADEVKGVRYSVFGCGDKNWAATYQKVPAFIDETLAAKGAENIADMGEADASDDFEGAYEEWSDHMWQDVAAYFNLDIENSEDNKSTLSLQFVDSAADMPLAKMHGAFSTNVVASKELQQPGSARSTRHLEIELPKEASYQEGDHLGVIPRNYEGIVNRVTARFGLSASQLIRLEAEEEKLAHLPLAKTVSVEELLQYVELQDPVTRTQLRAMAAKTVCPPHKVELEALLEKQAYKEQVLAKRLTMLELLEKYPACEMKFSEFIALLPSIRPRYYSISSSPRVDEKQASITVSVVSGPAWSGYGEYKGIASNYLAELQEGDTITCFISTDQSEFTLPKDPETPLIMVGPGTGVAPFRGFVQARKQLKEQGQSLGEAHLYFGCRSPHEDYLYQEELENAQSEGIITLHTAFSRMPNQPKTYVQHVMEQDGKKLIELLDQGAHFYICGDGSQMAPAVEATLMKSYADVHQVSEADARLWLQQLEEKGRYAKDVWAG

SEQ ID NO: 779 - DNA, 3147 bp, synthetic construct
  misc_feature 1..3147: note = Variant of cytochrome P450
  source 1..3147: mol_type = other DNA
atgacaattaaggaaatgcctcagcctaagacgtttggagaacttaaaaatttaccgttattaaacacagataaaccggttcaagctttgatgcgtattgcggatgaattaggagaaatctttaaattcgaggcgcctggtagcgtaacgcgctttttatcaagtcagcgtctaattaaagaagcatgcgatgaaagccgctttgataaaaacttaagtcaaggccttaaatttgcacgtgattttcttggagacgggttatttacaagctggacgcatgaaccgaattggaaaaaagcgcataatatcttaggcccaagctttagtcagctggcaatgggccgttatcatgcgatgatggtcgatatcgccgtgcagcttgttcaaaagtgggagcgtctaaatgcagatgagcatattgaagtatcggaagacatgacacgtttaacgctggatacaattggtctttgcggcttcaactatcgctttaacagcttttaccgagatcagccgcatccatttattgtgagtgttgagggtgcactggatgaagtaatgaacaagctgcagcgagcaaatccagacgacccagcttatgatgaaaacaagcgccagtgtcaagaagacatcaaggtgatgaacgactatgtcgataaaattattgcagatcgcaaagcaaggggtgaacaaagccatgatttattaacgcagatgctaaacggaaaagatccagcaacgggtgagccgcttgatgacgggaacattcgttatcaaattctgacattcttaattgcgggacacgaaacaacaagtggtcttttatcatttgcgctgtatttcttagtgaaaaatccacatgtattacaaaaagtagcagaagaagcagcacgagttctagtagatcctgttccaagctacaaacaagtcaaacagcttaaatatgtcggcatggtcttaaacgaagcgctgcgcttatggccaactgctcctgcgttttccctatatgcaaaagaagatacggtacttggaggagaatatcctttaaccaaaggcgacgaagtaatggttctgattcctcagcttcaccgtgataaaacaatttggggagacgatgtggaggaattccgtccagagcgttttgaaaatccaagtgcgattccgcagcatgcgtttaaaccgtttggaaacggtcagcgtgcgtgtatcggttggcagttcgctcttcatgaagcaacgctggtacttggtatgatgctaaaacactttgactttgaagatcatacaaactacgagctcgttattaaagaaaagttaacgttaaaacctgaaggctttgtggtaaaagcaaaatcgaaaggcattccgcttggcctgattccttcacctagcactgaacagtctgctaaaaaagtacgcaaaaaggcagaaaacgctcataatacgccgctgcttgtgctatacggttcaaatgcgggaacagctgaaggaacggcgcgtgatttagcagatattgcaatgagcaaaggatttgcaccgcaggtcgcaacgcttgattcacacgccggaaatcttccgcgcgaaggagctgtattaattgtaacggcgtcttataacggtcatccgcctgataacgcaaagcagtttgtcgactggttagaccaagcgtctgctgatgaagtaaaaggcgttcgctactccgtatttggatgcggcgataaaaactgggctgcgacgtatcaaaaagtgcctgcttttatcgatgaaacgcttgccgctaaaggggcagaaaacatcgctgacatgggtgagggtgatgcaagcgacgactttgaaggcgcgtatgaagaatggagtgatcatatgtggagcgacgtagcagcctactttaacctcgacattgaaaacagtgaagataataaatctactctttcacttcaatttgtcgacagcgccgcggatatgccgcttgcgaaaatgcacggtgcgttttcaacgaacgtcgtagcaagcaaagaacttcaacagccaggcagtgcacgaagcacgcgacatcttgaaattgaacttccaaaagaagcttcttatcaagaaggagatcatttaggtgttattcctcgcaactatgaaggaatagtaaaccgtgtaacagcaaggttcggcctaagcgcatcacagctgatccgtctggaagcagaagaagaaaaattagctcatttgccactcgctaaaacagtatccgtagaagagcttctgcaatacgtggagcttcaagatcctgttacgcgcacgcagcttcgcgcaatggctgctaaaacggtctgcccgccgcataaagtagagcttgaagccttgcttgaaaagcaagcctacaaagaacaagtgctggcaaaacgtttaacaatgcttgaactgcttgaaaaatacccggcgtgtgaaatgaaattcagcgaatttatcgcccttctgccaagcatacgcccgcgctattactcgatttcttcatcacctcgtgtcgatgaaaaacaagcaagcatcacggtcagcgttgtctcaggaccggcgtggagcggatatggagaatataaaggaattgcgtcgaactatcttgccgagctgcaagaaggagatacgattacgtgctttatttccacagatcagtcagaatttacgctgccaaaagaccctgaaacgccgcttatcatggtcggaccgggaacaggcgtcgcgccgtttagaggctttgtgcaggcgcgcaaacagctaaaagaacaaggacagtcacttggagaagcacatttatacttcggctgccgttcacctcatgaagactatctgtatcaagaagagcttgaaaacgcccaaagcgaaggcatcattacgcttcataccgctttttctcgcatgccaaatcagccgaaaacatacgttcagcacgtaatggaacaagacggcaagaaattgattgaacttcttgatcaaggagcgcacttctatatttgcggagacggaagccaaatggcacctgccgttgaagcaacgcttatgaaaagctatgctgacgttcaccaagtgagtgaggcagacgctcgcttatggctgcagcagctagaagaaaaaggccgatacgcaaaagacgtgtgggctggg

SEQ ID NO: 780 - protein, 1049 aa, synthetic construct
  REGION 1..1049: note = Variant of cytochrome P450
MTIKEMPQPKTFGELKNLPLLNTDKPVQALMRIADELGEIFKFEAPGSVTRFLSSQRLIKEACDESRFDKNLSQGLKFARDFLGDGLFTSWTHEPNWKKAHNILGPSFSQLAMGRYHAMMVDIAVQLVQKWERLNADEHIEVSEDMTRLTLDTIGLCGFNYRFNSFYRDQPHPFIVSVEGALDEVMNKLQRANPDDPAYDENKRQCQEDIKVMNDYVDKIIADRKARGEQSHDLLTQMLNGKDPATGEPLDDGNIRYQILTFLIAGHETTSGLLSFALYFLVKNPHVLQKVAEEAARVLVDPVPSYKQVKQLKYVGMVLNEALRLWPTAPAFSLYAKEDTVLGGEYPLTKGDEVMVLIPQLHRDKTIWGDDVEEFRPERFENPSAIPQHAFKPFGNGQRACIGWQFALHEATLVLGMMLKHFDFEDHTNYELVIKEKLTLKPEGFVVKAKSKGIPLGLIPSPSTEQSAKKVRKKAENAHNTPLLVLYGSNAGTAEGTARDLADIAMSKGFAPQVATLDSHAGNLPREGAVLIVTASYNGHPPDNAKQFVDWLDQASADEVKGVRYSVFGCGDKNWAATYQKVPAFIDETLAAKGAENIADMGEGDASDDFEGAYEEWSDHMWSDVAAYFNLDIENSEDNKSTLSLQFVDSAADMPLAKMHGAFSTNVVASKELQQPGSARSTRHLEIELPKEASYQEGDHLGVIPRNYEGIVNRVTARFGLSASQLIRLEAEEEKLAHLPLAKTVSVEELLQYVELQDPVTRTQLRAMAAKTVCPPHKVELEALLEKQAYKEQVLAKRLTMLELLEKYPACEMKFSEFIALLPSIRPRYYSISSSPRVDEKQASITVSVVSGPAWSGYGEYKGIASNYLAELQEGDTITCFISTDQSEFTLPKDPETPLIMVGPGTGVAPFRGFVQARKQLKEQGQSLGEAHLYFGCRSPHEDYLYQEELENAQSEGIITLHTAFSRMPNQPKTYVQHVMEQDGKKLIELLDQGAHFYICGDGSQMAPAVEATLMKSYADVHQVSEADARLWLQQLEEKGRYAKDVWAG

SEQ ID NO: 781 - DNA, 3147 bp, synthetic construct
  misc_feature 1..3147: note = Variant of cytochrome P450
  source 1..3147: mol_type = other DNA
atgacaattaaggaaatgcctcagcctaagacgtttggagaacttaaaaatttaccgttattaaacacagataaaccggttcaagctttgatgcgtattgcggatgaattaggagaaatctttaaattcgaggcgcctggtagcgtaacgcgctttttatcaagtcagcgtctaattaaagaagcatgcgatgaaagtcgctttgataaaaacttaagtcaaggccttaaatttgcacgtgattttcttggagacgggttatttacaagctggacgcatgaaccgaattggaaaaaagcgcataatatcttaggcccaagctttagtcagcatgcaatgggccgttatcatgcgatgatggtcgatatcgccgtgcagcttgttcaaaagtgggagcgtctaaatgcagatgagcatattgaagtatcggaagacatgacacgtttaacgctggatacaattggtctttgcggcttcaactatcgctttaacagcttttaccgagatcagccgcatccatttattgtgagtgttgagggtgcactggatgaagtaatgaacaagctgcagcgagcaaatccagacgacccagcttatgatgaaaacaagcgccagtgtcaagaagacatcaaggtgatgaacgactatgtcgataaaattattgcagatcgcaaagcaaggggtgaacaaagccatgatttattaacgcagatgctaaacggaaaagatccagcaacgggtgagccgcttgatgacgggaacattcgttatcaaattctgacattcttaattgcgggacacgaaacaacaagtggtcttttatcatttgcgctgtatttcttagtgaaaaatccacatgtattacaaaaagtagcagaagaagcagcacgagttctagtagatcctgttccaagctacaaacaagtcaaacagcttaaatatgtcggcatggtcttaaacgaagcgctgcgcttatggccaactgctcctgcgttttccctatatgcaaaagaagatacggtacttggaggagaatatcctttaaccaaaggcgacgaagtaatggttctgattcctcagcttcaccgtgataaaacaatttggggagacgatgtggaggaattccgtccagagcgttttgaaaatccaagtgcgattccgcagcatgcgtttaaaccgtttggaaacggtcagcgtgcgtgtatcggttggcagttcgctcttcatgaagcaacgctggtacttggtatgatgctaaaacactttgactttgaagatcatacaaactacgagctcgttattaaagaaaagttaacgttaaaacctgaaggctttgtggtaaaagcaaaatcgaaaggcattccgcttggcctgattccttcacctagcactgaacagtctgctaaaaaagtacgcaaaaaggcagaaaacgctcataatacgccgctgcttgtgctatacggttcaaatgcgggaacagctgaaggaacggcgcgtgatttagcagatattgcaatgagcaaaggatttgcaccgcaggtcgcaacgcttgattcacacgccggaaatcttccgcgcgaaggagctgtattaattgtaacggcgtcttataacggtcatccgcctgataacgcaaagcagtttgtcgactggttagaccaagcgtctgctgatgaagtaaaaggcgttcgctactccgtatttggatgcggcgataaaaactgggctgcgacgtatcaaaaagtgcctgcttttatcgatgaaacgcttgccgctaaaggggcagaaaacatcgctgaccgcggtttcggtgatgcaagcgacgactttgaaggcgcgtatgaagaatggagtgatcatatgtggagcgacgtagcagcctactttaacctcgacattgaaaacagtgaagataataaatctactctttcacttcaatttgtcgacagcgccgcggatatgccgcttgcgaaaatgcacggtgcgttttcaacgaacgtcgtagcaagcaaagaacttcaacagccaggcagtgcacgaagcacgcgacatcttgaaattgaacttccaaaagaagcttcttatcaagaaggagatcatttaggtgttattcctcgcaactatgaaggaatagtaaaccgtgtaacagcaaggttcggcctaagcgcatcacagctgatccgtctggaagcagaagaagaaaaattagctcatttgccactcgctaaaacagtatccgtagaagagcttctgcaatacgtggagcttcaagatcctgttacgcgcacgcagcttcgcgcaatggctgctaaaacggtctgcccgccgcataaagtagagcttgaagccttgcttgaaaagcaagcctacaaagaacaagtgctggcaaaacgtttaacaatgcttgaactgcttgaaaaatacccggcgtgtgaaatgaaattcagcgaatttatcgcccttctgccaagcatacgcccgcgctattactcgatttcttcatcacctcgtgtcgatgaaaaacaagcaagcatcacggtcagcgttgtctcaggagacgcgtggagcggatatggagaatataaaggaattgcgtcgaactatcttgccgagctgcaagaaggagatacgattacgtgctttatttccacagatcagtcagaatttacgctgccaaaagaccctgaaactccgcttatcatggtcggaccgggaacaggcgtcgcgccgtttagaggctttgtgcaggcgcgcaaacagctaaaagaacaaggacagtcacttggagaagcacatttatacttcggctgccgttcacctcatgaagactatctgtatcaagaagagcttgaaaacgcccaaagcgaaggcatcattacgcttcataccgctttttctcgcatgccaaatcagccgaaaacatacgttcagcacgtaatggaacaagacggcaagaaattgattgaacttcttgatcaaggagcgcacttctatatctgcggagacggaagccaaatggcacctgccgttgaagcaacgcttatgaaaagctatgctgacgttcaccaagtgagtgaggcagacgctcgcttatggctgcagcagctagaagaaaaaggccgatacgcaaaagacgtgtgggctggg

SEQ ID NO: 782 - protein, 1049 aa, synthetic construct
  REGION 1..1049: note = Variant of cytochrome P450
MTIKEMPQPKTFGELKNLPLLNTDKPVQALMRIADELGEIFKFEAPGSVTRFLSSQRLIKEACDESRFDKNLSQGLKFARDFLGDGLFTSWTHEPNWKKAHNILGPSFSQHAMGRYHAMMVDIAVQLVQKWERLNADEHIEVSEDMTRLTLDTIGLCGFNYRFNSFYRDQPHPFIVSVEGALDEVMNKLQRANPDDPAYDENKRQCQEDIKVMNDYVDKIIADRKARGEQSHDLLTQMLNGKDPATGEPLDDGNIRYQILTFLIAGHETTSGLLSFALYFLVKNPHVLQKVAEEAARVLVDPVPSYKQVKQLKYVGMVLNEALRLWPTAPAFSLYAKEDTVLGGEYPLTKGDEVMVLIPQLHRDKTIWGDDVEEFRPERFENPSAIPQHAFKPFGNGQRACIGWQFALHEATLVLGMMLKHFDFEDHTNYELVIKEKLTLKPEGFVVKAKSKGIPLGLIPSPSTEQSAKKVRKKAENAHNTPLLVLYGSNAGTAEGTARDLADIAMSKGFAPQVATLDSHAGNLPREGAVLIVTASYNGHPPDNAKQFVDWLDQASADEVKGVRYSVFGCGDKNWAATYQKVPAFIDETLAAKGAENIADRGFGDASDDFEGAYEEWSDHMWSDVAAYFNLDIENSEDNKSTLSLQFVDSAADMPLAKMHGAFSTNVVASKELQQPGSARSTRHLEIELPKEASYQEGDHLGVIPRNYEGIVNRVTARFGLSASQLIRLEAEEEKLAHLPLAKTVSVEELLQYVELQDPVTRTQLRAMAAKTVCPPHKVELEALLEKQAYKEQVLAKRLTMLELLEKYPACEMKFSEFIALLPSIRPRYYSISSSPRVDEKQASITVSVVSGDAWSGYGEYKGIASNYLAELQEGDTITCFISTDQSEFTLPKDPETPLIMVGPGTGVAPFRGFVQARKQLKEQGQSLGEAHLYFGCRSPHEDYLYQEELENAQSEGIITLHTAFSRMPNQPKTYVQHVMEQDGKKLIELLDQGAHFYICGDGSQMAPAVEATLMKSYADVHQVSEADARLWLQQLEEKGRYAKDVWAG

SEQ ID NO: 783 - DNA, 3147 bp, synthetic construct
  misc_feature 1..3147: note = Variant of cytochrome P450
  source 1..3147: mol_type = other DNA
atgacaattaaggaaatgcctcagcctaagacgtttggagaacttaaaaatttaccgttattaaacacagataaaccggttcaagctttgatgcgtattgcggatgaattaggagaaatctttaaattcgaggcgcctggtagcgtaacgcgctttttatcaagtcagcgtctaattaaagaagcatgcgatgaaagccgctttgataaaaacttaagtcaaggccttaaatttgcacgtgattttcttggagacgggttatttacaagctggacgcatgaaccgaattggaaaaaagcgcataatatcttaggcccaagctttagtcagcatgcaatgggccgttatcatgcgatgatggtcgatatcgccgtgcagcttgttcaaaagtgggagcgtctaaatgcagatgagcatattgaagtatcggaagacatgacacgtttaacgctggatacaattggtctttgcggcttcaactatcgctttaacagcttttaccgagatcagccgcatccatttattgtgagtgttgagggtgcactggatgaagtaatgaacaagctgcagcgagcaaatccagacgacccagcttatgatgaaaacaagcgccagtgtcaagaagacatcaaggtgatgaacgactatgtcgataaaattattgcagatcgcaaagcaaggggtgaacaaagccatgatttattaacgcagatgctaaacggaaaagatccagcaacgggtgagccgcttgatgacgggaacattcgttatcaaattctgacattcttaattgcgggacacgaaacaacaagtggtcttttatcatttgcgctgtatttcttagtgaaaaatccacatgtattacaaaaagtagcagaagaagcagcacgagttctagtagatcctgttccaagctacaaacaagtcaaacagcttaaatatgtcggcatggtcttaaacgaagcgctgcgcttatggccaactgctcctgcgttttccctatatgcaaaagaagatacggtacttggaggagaatatcctttaaccaaaggcgacgaagtaatggttctgattcctcagcttcaccgtgataaaacaatttggggagacgatgtggaggaattccgtccagagcgttttgaaaatccaagtgcgattccgcagcatgcgtttaaaccgtttggaaacggtcagcgtgcgtgtatcggttggcagttcgctcttcatgaagcaacgctggtacttggtatgatgctaaaacactttgactttgaagatcatacaaactacgagctcgttattaaagaaaagttaacgttaaaacctgaaggctttgtggtaaaagcaaaatcgaaaggcattccgcttggcctgattccttcacctagcactgaacagtctgctaaaaaagtacgcaaaaaggcagaaaacgctcataatacgccgctgcttgtgctatacggttcaaatgcgggaacagctgaaggaacggcgcgtgatttagcagatattgcaatgagcaaaggatttgcaccgcaggtcgcaacgcttgattcacacgccggaaatcttccgcgcgaaggagctgtattaattgtaacggcgtcttataacggtcatccgcctgataacgcaaagcagtttgtcgactggttagaccaagcgtctgctgatgaagtaaaaggcgttcgctactccgtatttggatgcggcgataaaaactgggctgcgacgtatcaaaaagtgcctgcttttatcgatgaaacgcttgccgctaaaggggcagaaaacatcgctgaccgcggtgaggctgatgcaagcgacgactttgaaggcgcgtatgaagaatggagtgatcatatgtggaccgacgtagcagcctactttaacctcgacattgaaaacagtgaagataataaatctactcttagccttcaatttgtcgacagcgccgcggatatgccgcttgcgaaaatgcacggtgcgttttcaacgaacgtcgtagcaagcaaagaacttcaacagccaggcagtgcacgaagcacgcgacatcttgaaattgaacttccaaaagaagcttcttatcaagaaggagatcatttaggtgttattcctcgcaactatgaaggaatagtaaaccgtgtaacagcaaggttcggcctaagcgcatcacagcaaatccgtctggaagcagaagaagaaaaattagctcatttgccactcgctaaaacagtatccgtagaagagcttctgcaatacgtggagcttcaagatcctgttacgcgcacgcagcttcgcgcaatggctgctaaaacggtctgcccgccgcataaagtagagcttgaagccttgcttgaaaagcaagcctacaaagaacaagtgctggcaaaacgtttaacaatgcttgaactgcttgaaaaatacccggcgtgtgaaatgaaattcagcgaatttatcgcccttctgccaagcatacgcccgcgctattactcgatttcttcatcacctcgtgtcgatgaaaaacaagcaagcatcacggtcagcgttgtctcaggaccagcgtggagcggatatggagaatataaaggaattgcgtcgaactatcttgccgagctgcaagaaggagatacgattacgtgctttatttccacagatcagtcagaatttacgctgccaaaagaccctgaaacgccgcttatcatggtcggaccgggaacaggcgtcgcgccgtttagaggctttgtgcaggcgcgcaaacagctaaaagaacaaggacagtcacttggagaagcacatttatacttcggctgccgttcacctcatgaagactatctgtatcaagaagagcttgaaaacgcccaaagcgaaggcatcattacgcttcataccgctttttctcgcatgccaaatcagccgaaaacatacgttcagcacgtaatggaacaagacggcaagaaattgattgaacttcttgatcaaggagcgcacttctatatctgcggagacggaagccaaatggcacctgccgttgaagcaacgcttatgaaaagctatgctgacgttcaccaagtgagtgaggcagacgctcgcttatggctgcagcagctagaagaaaaaggccgatacgcaaaagacgtgtgggctggg

SEQ ID NO: 784 - protein, 1049 aa, synthetic construct
  REGION 1..1049: note = Variant of cytochrome P450
MTIKEMPQPKTFGELKNLPLLNTDKPVQALMRIADELGEIFKFEAPGSVTRFLSSQRLIKEACDESRFDKNLSQGLKFARDFLGDGLFTSWTHEPNWKKAHNILGPSFSQHAMGRYHAMMVDIAVQLVQKWERLNADEHIEVSEDMTRLTLDTIGLCGFNYRFNSFYRDQPHPFIVSVEGALDEVMNKLQRANPDDPAYDENKRQCQEDIKVMNDYVDKIIADRKARGEQSHDLLTQMLNGKDPATGEPLDDGNIRYQILTFLIAGHETTSGLLSFALYFLVKNPHVLQKVAEEAARVLVDPVPSYKQVKQLKYVGMVLNEALRLWPTAPAFSLYAKEDTVLGGEYPLTKGDEVMVLIPQLHRDKTIWGDDVEEFRPERFENPSAIPQHAFKPFGNGQRACIGWQFALHEATLVLGMMLKHFDFEDHTNYELVIKEKLTLKPEGFVVKAKSKGIPLGLIPSPSTEQSAKKVRKKAENAHNTPLLVLYGSNAGTAEGTARDLADIAMSKGFAPQVATLDSHAGNLPREGAVLIVTASYNGHPPDNAKQFVDWLDQASADEVKGVRYSVFGCGDKNWAATYQKVPAFIDETLAAKGAENIADRGEADASDDFEGAYEEWSDHMWTDVAAYFNLDIENSEDNKSTLSLQFVDSAADMPLAKMHGAFSTNVVASKELQQPGSARSTRHLEIELPKEASYQEGDHLGVIPRNYEGIVNRVTARFGLSASQQIRLEAEEEKLAHLPLAKTVSVEELLQYVELQDPVTRTQLRAMAAKTVCPPHKVELEALLEKQAYKEQVLAKRLTMLELLEKYPACEMKFSEFIALLPSIRPRYYSISSSPRVDEKQASITVSVVSGPAWSGYGEYKGIASNYLAELQEGDTITCFISTDQSEFTLPKDPETPLIMVGPGTGVAPFRGFVQARKQLKEQGQSLGEAHLYFGCRSPHEDYLYQEELENAQSEGIITLHTAFSRMPNQPKTYVQHVMEQDGKKLIELLDQGAHFYICGDGSQMAPAVEATLMKSYADVHQVSEADARLWLQQLEEKGRYAKDVWAG

SEQ ID NO: 785 - DNA, 3147 bp, synthetic construct
  misc_feature 1..3147: note = cytochrome P450 wild type
  source 1..3147: mol_type = other DNA
atgacaattaaagaaatgcctcagccaaaaacgtttggagagcttaaaaatttaccgttattaaacacagataaaccggttcaagctttgatgaaaattgcggatgaattaggagaaatctttaaattcgaggcgcctggtcgtgtaacgcgctacttatcaagtcagcgtctaattaaagaagcatgcgatgaatcacgctttgataaaaacttaagtcaagcgcttaaatttgtacgtgattttgcaggagacgggttatttacaagctggacgcatgaaaaaaattggaaaaaagcgcataatatcttacttccaagcttcagtcagcaggcaatgaaaggctatcatgcgatgatggtcgatatcgccgtgcagcttgttcaaaagtgggagcgtctaaatgcagatgagcatattgaagtaccggaagacatgacacgtttaacgcttgatacaattggtctttgcggctttaactatcgctttaacagcttttaccgagatcagcctcatccatttattacaagtatggtccgtgcactggatgaagcaatgaacaagctgcagcgagcaaatccagacgacccagcttatgatgaaaacaagcgccagtttcaagaagatatcaaggtgatgaacgacctagtagataaaattattgcagatcgcaaagcaagcggtgaacaaagcgatgatttattaacgcatatgctaaacggaaaagatccagaaacgggtgagccgcttgatgacgagaacattcgctatcaaattattacattcttaattgcgggacacgaaacaacaagtggtcttttatcatttgcgctgtatttcttagtgaaaaatccacatgtattacaaaaagcagcagaagaagcagcacgagttctagtagatcctgttccaagctacaaacaagtcaaacagcttaaatatgtcggcatggtcttaaacgaagcgctgcgcttatggccaactgctcctgcgttttccctatatgcaaaagaagatacggtgcttggaggagaatatcctttagaaaaaggcgacgaactaatggttctgattcctcagcttcaccgtgataaaacaatttggggagacgatgtggaagagttccgtccagagcgttttgaaaatccaagtgcgattccgcagcatgcgtttaaaccgtttggaaacggtcagcgtgcgtgtatcggtcagcagttcgctcttcatgaagcaacgctggtacttggtatgatgctaaaacactttgactttgaagatcatacaaactacgagctggatattaaagaaactttaacgttaaaacctgaaggctttgtggtaaaagcaaaatcgaaaaaaattccgcttggcggtattccttcacctagcactgaacagtctgctaaaaaagtacgcaaaaaggcagaaaacgctcataatacgccgctgcttgtgctatacggttcaaatatgggaacagctgaaggaacggcgcgtgatttagcagatattgcaatgagcaaaggatttgcaccgcaggtcgcaacgcttgattcacacgccggaaatcttccgcgcgaaggagctgtattaattgtaacggcgtcttataacggtcatccgcctgataacgcaaagcaatttgtcgactggttagaccaagcgtctgctgatgaagtaaaaggcgttcgctactccgtatttggatgcggcgataaaaactgggctactacgtatcaaaaagtgcctgcttttatcgatgaaacgcttgccgctaaaggggcagaaaacatcgctgaccgcggtgaagcagatgcaagcgacgactttgaaggcacatatgaagaatggcgtgaacatatgtggagtgacgtagcagcctactttaacctcgacattgaaaacagtgaagataataaatctactctttcacttcaatttgtcgacagcgccgcggatatgccgcttgcgaaaatgcacggtgcgttttcaacgaacgtcgtagcaagcaaagaacttcaacagccaggcagtgcacgaagcacgcgacatcttgaaattgaacttccaaaagaagcttcttatcaagaaggagatcatttaggtgttattcctcgcaactatgaaggaatagtaaaccgtgtaacagcaaggttcggcctagatgcatcacagcaaatccgtctggaagcagaagaagaaaaattagctcatttgccactcgctaaaacagtatccgtagaagagcttctgcaatacgtggagcttcaagatcctgttacgcgcacgcagcttcgcgcaatggctgctaaaacggtctgcccgccgcataaagtagagcttgaagccttgcttgaaaagcaagcctacaaagaacaagtgctggcaaaacgtttaacaatgcttgaactgcttgaaaaatacccggcgtgtgaaatgaaattcagcgaatttatcgcccttctgccaagcatacgcccgcgctattactcgatttcttcatcacctcgtgtcgatgaaaaacaagcaagcatcacggtcagcgttgtctcaggagaagcgtggagcggatatggagaatataaaggaattgcgtcgaactatcttgccgagctgcaagaaggagatacgattacgtgctttatttccacaccgcagtcagaatttacgctgccaaaagaccctgaaacgccgcttatcatggtcggaccgggaacaggcgtcgcgccgtttagaggctttgtgcaggcgcgcaaacagctaaaagaacaaggacagtcacttggagaagcacatttatacttcggctgccgttcacctcatgaagactatctgtatcaagaagagcttgaaaacgcccaaagcgaaggcatcattacgcttcataccgctttttctcgcatgccaaatcagccgaaaacatacgttcagcacgtaatggaacaagacggcaagaaattgattgaacttcttgatcaaggagcgcacttctatatttgcggagacggaagccaaatggcacctgccgttgaagcaacgcttatgaaaagctatgctgacgttcaccaagtgagtgaagcagacgctcgcttatggctgcagcagctagaagaaaaaggccgatacgcaaaagacgtgtgggctggg

SEQ ID NO: 786 - protein, 1049 aa, synthetic construct [sequence omitted]

SEQ ID NO: 787 - DNA, 1008 bp, synthetic construct
  misc_feature 1..1008: note = Variant of phosphite dehydrogenase
  source 1..1008: mol_type = other DNA
atgctgccgaaactcgttataactcacagagtacacgaagagatcctgcaactgctggcgccacattgcgagctgataaccaaccagaccgacagcacgctgacgcgcgaggaaattctgcggcgctgtgcagatgctcaggcgatgatggcgttcatgcccgatcgggtcgatgcagactttcttcaagcctgccctgagctgcgtgtaatcggctgtgccctcaagggcttcgacaatttcgatgtggacgcctgtactgcacgcggggtctggctgaccttcgtgcctgatctgttgacggtcccgttggccgagctggcgatcggactggcggtggggctggggcggcatttccgggcagcagatgcattcgtccgctctggcaagttccagggctggcagccaattttctacggcacggggctggatggagcaacggtcggcttccttggcatgggcgccatcggaaaagccatggctgatcgcttgcagggatggggcgcgaccctgcagtaccactcgcggacagctctggatacacaaaccgagcaacggctcggcctgcgccaggtggcgtgcagcgaactcttcgccagctcggacttcatcctgaatgcgcttcccttgaatgccgataccctgcatctggtcaacgccgagctgcttgccctcgtacggccgggcgctctgcttgtaaacccctgtcgtggctctgtagtggatgaagccgccgtgctcgcggcgcttgagcgaggccagctcggcgggtatgcggcggatgtgttcgaaatggaggactgggctcgcgcggaccggccgcagcagatcgatcctgcgctgctcgcgcatccgaatacgctgttcactccgcaccttgggtcggcagtgcgcgcggtgcgcctggagattgaacgttgtgcagcgcagaacatcctccaggcattgcgaggtgagcgcccaattgacgctgtgaaccgtctgcccaaggccgagcctgccgcatgt

SEQ ID NO: 788 - protein, 336 aa, synthetic construct
  REGION 1..336: note = Variant of phosphite dehydrogenase
MLPKLVITHRVHEEILQLLAPHCELITNQTDSTLTREEILRRCADAQAMMAFMPDRVDADFLQACPELRVIGCALKGFDNFDVDACTARGVWLTFVPDLLTVPLAELAIGLAVGLGRHFRAADAFVRSGKFQGWQPIFYGTGLDGATVGFLGMGAIGKAMADRLQGWGATLQYHSRTALDTQTEQRLGLRQVACSELFASSDFILNALPLNADTLHLVNAELLALVRPGALLVNPCRGSVVDEAAVLAALERGQLGGYAADVFEMEDWARADRPQQIDPALLAHPNTLFTPHLGSAVRAVRLEIERCAAQNILQALRGERPIDAVNRLPKAEPAAC
